(19) United States
(12) Patent Application Publication
(10) Pub. No.: US 2024/0270821 A1
(43) Pub. Date: Aug. 15, 2024

(54) GIP/GLP1/GCG TRI-RECEPTOR AGONISTS AND USES THEREOF

(71) Applicant: Eli Lilly and Company, Indianapolis, IN (US)

(72) Inventors: Milata Mary Abraham, Indianapolis, IN (US); Robert Andrew BROWN, Carmel, IN (US); Tamer COSKUN, Carmel, IN (US); David Benjamin FLORA, Greenfield, IN (US); Paul Joseph KLEINDL, Lebanon, IN (US); Fucheng QU, Carmel, IN (US); Hongchang QU, Carmel, IN (US); James Lincoln WALLIS, Indianapolis, IN (US)

(21) Appl. No.: 18/428,102

(22) Filed: Jan. 31, 2024

Related U.S. Application Data
(60) Provisional application No. 63/482,404, filed on Jan. 31, 2023.

(51) Int. Cl. C07K 14/72; A61P 3/04; A61K 38/00

(52) U.S. Cl. CPC C07K 14/72; A61P 3/04; A61K 38/00

(57) ABSTRACT

Polypeptides are provided that have activity at each of the GIP, GLP-1 and glucagon receptors. The polypeptides have structural features resulting in activity and extended duration of action at each of these receptors. Methods also are provided for treating diseases and/or conditions such as obesity, chronic weight management, type 2 diabetes mellitus, non-alcoholic fatty liver disease (NAFLD), non-alcoholic steatohepatitis (NASH), dyslipidemia, metabolic syndrome, Chronic Kidney Disease (CKD), osteoarthritis (OA), obesity-related sleep apnea (OSA) and polycystic ovary syndrome (PCOS).

### SEQUENCE LISTING

[0001] The present application is being filed along with a Sequence Listing in ST.26 XML format. The Sequence Listing is provided as a file titled “30475_US_SL” created 24 Jan. 2024 and is 4.84 megabytes in size. The Sequence Listing information in the ST.26 XML format is incorporated herein by reference in its entirety.

### FIELD OF INVENTION

[0002] This disclosure relates to polypeptides having activity at each of a glucose-dependent insulinotropic polypeptide (GIP), glucagon-like peptide-1 (GLP-1) and glucagon (GCG) receptors. The polypeptides described herein have structural features that provide appropriate activity levels and extended duration of action at each of these receptors. Furthermore, the present invention relates to compounds that may be administered orally or subcutaneously. Such polypeptides may be useful for treating disorders or conditions such as obesity, chronic weight management, type 2 diabetes mellitus (T2DM), dyslipidemia, metabolic syndrome, non-alcoholic fatty liver disease (NAFLD), non-alcoholic steatohepatitis (NASH), chronic kidney disease (CKD), osteoarthritis (OA), obesity-related sleep apnea (OSA) and/or polycystic ovary syndrome (PCOS).

### BACKGROUND

[0003] Over the past several decades, the prevalence of diabetes has continued to rise. T2DM is the most common form of diabetes accounting for about 90% of all diabetes. T2DM is characterized by high blood glucose levels caused by insulin resistance. The current standard of care for T2DM includes diet and exercise, as well as treatment with oral medications and injectable glucose-lowering drugs including incretin-based therapies, such as GLP-1 receptor agonists. A variety of GLP-1 analogs are currently available for treating T2DM, including dulaglutide, exenatide and liraglutide. Many currently marketed GLP-1 receptor agonists, however, are dose-limited by gastrointestinal side effects, such as nausea and vomiting. Subcutaneous injection is the typical route of administration for the available GLP-1 receptor agonists. When treatment with available oral medications and incretin-based therapies is insufficient, insulin is considered. Despite the treatment options available, significant numbers of individuals receiving approved therapies are not reaching glycemic control goals (see. e.g., Casagrande et al. (2013) Diabetes Care 36:2271-2279). Uncontrolled diabetes can lead to one or more conditions that impact morbidity and mortality of such individuals.

[0004] One of the main risk factors for T2DM is obesity, and a majority of individuals with T2DM (˜90%) are overweight or obese. Obesity is a complex medical disorder resulting in excessive accumulation of adipose tissue mass. Today obesity is a global public health concern that is associated with undesired health outcomes and morbidities. Desired treatments for patients with obesity strive to reduce excess body weight, improve obesity-related co-morbidities, and maintain long-term weight reduction. Available treatments for obesity are particularly unsatisfactory for patients with severe obesity. There is a need for alternative treatment options to induce therapeutic weight loss in patients in need of such treatment.

[0005] In view thereof, new therapies being studied include compounds having not only activity at a GLP-1 receptor but also activity at one or more other receptors, such as the GIP and/or glucagon receptors.

[0006] For example, Int'l Patent Application Publication No. WO2013/164483 and WO2016/111971 describe polypeptides stated to have GLP-1 and GIP receptor activity. WO2011/075393, WO2012/177444, and WO2016/209707 describe polypeptides stated to have GCG and GIP receptor activity.

[0007] Furthermore, certain compounds have been described as having triple agonist activity (i.e., activity at each of the GIP, GLP-1 and glucagon receptors). For example, WO2015/067716 describes glucagon analogs having triple agonist activity. Similarly, WO2016/198624 describes analogs of exendin-4, itself a GLP-1 analog, having triple agonist activity. Likewise, WO2014/049610 and WO2017/116204 each describe a variety of analogs having triple agonist activity. Moreover, Int'l Patent Application No. WO2017/153375 describes glucagon and GLP-1 co-agonists that also are stated to have GIP activity. Furthermore, WO2019/125938, WO2019/125929 and WO2021/126695 each describe a variety of polypeptides having triple agonist activity.

[0008] Nevertheless, a need remains for compounds that are capable of providing effective glucose control with weight loss benefits and a favorable side effect profile. There is also a need for alternate treatment options to provide therapeutic weight loss or chronic weight management in a patient in need of such treatment. There also is a need for therapeutic agents available for use with sufficiently extended duration of action to allow for dosing as infrequently as once a day, thrice-weekly, twice-weekly, or once a week. Furthermore, there is a desire and need for compounds that are amenable to convenient modes of administration, such as subcutaneous or oral route. In particular, there is a desire for compounds that exhibit sufficient efficacy with a favorable side effect profile, and/or stability and bioavailability so that they can be administered orally.

### SUMMARY

[0009] The polypeptides described herein seek to meet one or more of the needs above. Accordingly, this disclosure describes polypeptides with activity at each of the GIP, GLP-1 and glucagon receptors. The polypeptides described herein allow for administration of doses that provide sufficient activity at each receptor to provide the benefits of agonism of that receptor while avoiding unwanted side effects associated with too much activity. Moreover, the polypeptides described herein have extended duration of action at the GIP, GLP-1 and glucagon receptors allowing for dosing as infrequently as once-a-day, thrice-weekly, twice-weekly, or once-a-week. In this manner, the polypeptides result in enhanced glucose control, metabolic benefits such as body weight lowering and/or improved body composition, lipid benefits, and/or other benefits such as an increase in bone mass or bone formation or a decrease in bone resorption. Furthermore, the polypeptides described herein are suitable for subcutaneous or oral administration. This disclosure also describes effective treatments for disorders or conditions, including obesity, chronic weight management, type 2 diabetes mellitus, NAFLD, NASH, dyslipidemia, metabolic disorder, CKD, OA, OSA and PCOS.

[0010] In one embodiment, a polypeptide is provided that includes the formula I (SEQ ID NO:4):

X₁X₂QGTX₆TSDX₁₀X₁₁X₁₂X₁₃LDX₁₆X₁₇AX₁₉X₂₀X₂₁
FX₂₃X₂₄X₂₅LX₂₇X₂₈X₂₉X₃₀X₃₁SSX₃₄X₃₅X₃₆X₃₇
X₃₈X₃₉X₄₀X₄₁X₄₂,

[0011] wherein:
   [0012] X₁ is Y, NMeY or H,
   [0013] X₂ is Aib,
   [0014] X₆ is F, αMeF or αMeF(2F),
   [0015] X₁₀ is F, 4-Pal, F(4CN), 3-Pal, F(4NO₂) or Y,
   [0016] X₁₁ is S or αMeS,
   [0017] X₁₂ is Orn, K, R, Q, Dap, Dab, S, E or I,
   [0018] X₁₃ is αMeL, I or L,
   [0019] X₁₆ is K, Orn, A or E,
   [0020] X₁₇ is any amino acid with a functional group available for conjugation to a fatty acid, A, I or Q,
   [0021] X₁₉ is Q or A,
   [0022] X₂₀ is any amino acid with a functional group available for conjugation to a fatty acid, Aib, αMe-4-Pal, Q or R,
   [0023] X₂₁ is A, Q, Orn, Aad, Aib, S, N, E or T,
   [0024] X₂₃ is I or V,
   [0025] X₂₄ is any amino acid with a functional group available for conjugation to a fatty acid, E, Q, D-Glu or N,
   [0026] X₂₅ is W, Y, F, 4-Pal, αMeY or αMe-4-Pal,
   [0027] X₂₇ is L, I, E, V, A, Q or S,
   [0028] X₂₈ is any amino acid with a functional group available for conjugation to a fatty acid, E or A,
   [0029] X₂₉ is G, D-Ala, Aib, T or A,
   [0030] X₃₀ is A or G,
   [0031] X₃₁ is P, H, S, 4-Pal, E, T, K(Ac) or Hyp (hydroxyproline),
   [0032] X₃₄ is G or Aib,
   [0033] X₃₅ is A, Aib, E, H or 4-Pal,
   [0034] X₃₆ is P or Hyp,
   [0035] X₃₇ is P, Hyp or E,
   [0036] X₃₈ is P or Hyp,
   [0037] X₃₉ is E, S, G, T, H, 4-Pal, γE or A,
   [0038] X₄₀ is absent or G, E, S, A or T,
   [0039] wherein if X₄₀ is G, E, S, A or T, then X₄₁ is absent or E, S, T, 4-Pal, D, G, Q or H,
   [0040] wherein if X₄₁ is E, S, T, 4-Pal, D, G, Q or H, then X₄₂ is absent or G, E or γE,
   [0041] wherein if X₄₀ is absent, then X₄₁ and X₄₂ are also absent,
   [0042] wherein if X₄₁ is absent, then X₄₂ is also absent,
   [0043] wherein at least one of X₁₇, X₂₀, X₂₄ and X₂₈ is an amino acid with a functional group available for conjugation to a fatty acid,
   [0044] wherein the C-terminal amino acid is optionally amidated;
   [0045] or a pharmaceutically acceptable salt thereof.

[0046] In some embodiments, the amino acid at position X₁₇, X₂₀, X₂₄ or X₂₈ with a functional group available for conjugation to a fatty acid is K, C, E or D. In some embodiments, the amino acid at position X₁₇, X₂₀, X₂₄ or X₂₈ with a functional group available for conjugation to a fatty acid is K. In some embodiments, X₁₀ is F or 4-Pal. In some embodiments, X₁₂ is Om, K, R or Q.

[0047] In some embodiments, only one of X₁₇, X₂₀, X₂₄ and X₂₈ is an amino acid with a functional group available for conjugation to a fatty acid.

[0048] In some embodiments, only one of X₁₇, X₂₀, X₂₄, or X₂₈ is conjugated to a fatty acid, via a direct bond or via a linker between the amino acid and the fatty acid. In some embodiments, only one of X₁₇, X₂₀, X₂₄, or X₂₈ is conjugated to a fatty acid via a linker between the amino acid and the fatty acid. In some embodiments, the fatty acid is a C₁₆-C₂₂ fatty acid.

[0049] In one embodiment, a polypeptide is provided that includes the formula l′ (SEQ ID NO:1243):

X₁X₂QX₄TX₆TSDX₁₀X₁₁X₁₂X₁₃LX₁₅X₁₆X₁₇AX₁₉X₂₀
X₂₁FX₂₃X₂₄X₂₅LX₂₇X₂₈X₂₉X₃₀X₃₁X₃₂SX₃₄X₃₅X₃₆
X₃₇X₃₈X₃₉X₄₀X₄₁X₄₂X₄₃X₄₄X₄₅X₄₆,

wherein:
[0050] X₁ is Y, NMeY or H,
[0051] X₂ is Aib,
[0052] X₄ is G or D-Ala,
[0053] X₆ is F, αMeF or αMeF(2F),
[0054] X₁₀ is F, 4-Pal, F(4CN), 3-Pal, F(4NO₂) or Y,
[0055] X₁₁ is S or αMeS,
[0056] X₁₂ is Orn, K, R, Q, Dap, Dab, S, E or I,
[0057] X₁₃ is αMeL, I or L,
[0058] X₁₅ is D or E,
[0059] X₁₆ is K, Orn, A or E,
[0060] X₁₇ is any amino acid with a functional group available for conjugation to a fatty acid, A, I, Q or Orn,
[0061] X₁₉ is Q or A,
[0062] X₂₀ is any amino acid with a functional group available for conjugation to a fatty acid, Aib, αMe-4-Pal, Q, R or L-Iva,
[0063] X₂₁ is A, Q, Om, Aad, Aib, S, N, E or T,
[0064] X₂₃ is I or V,
[0065] X₂₄ is any amino acid with a functional group available for conjugation to a fatty acid, E, Q, D-Glu, N or D-Gln,
[0066] X₂₅ is W, Y, F, 4-Pal, αMeY or αMe-4-Pal,
[0067] X₂₇ is L, I, E, V, A, Q, S, T or Aad,
[0068] X₂₈ is any amino acid with a functional group available for conjugation to a fatty acid, E, Q or A,
[0069] X₂₉ is G, D-Ala, Aib, T or A,
[0070] X₃₀ is A, S or G,
[0071] X₃₁ is P, H, S, 4-Pal, E, T, K(Ac) or Hyp (hydroxyproline),
[0072] X₃₂ is S or P
[0073] X₃₄ is G or Aib,
[0074] X₃₅ is A, Aib, E, D, H or 4-Pal or Orn,
[0075] X₃₆ is P or Hyp,
[0076] X₃₇ is P, Hyp or E,
[0077] X₃₈ is P or Hyp,
[0078] X₃₉ is E, S, G, T, H, 4-Pal, γE or A or Orn,
[0079] X₄₀ is absent or G, E, S, A, T, or D-Glu,
[0080] wherein if X₄₀ is G, E, S, A, T or D-Glu, then X₄₁ is absent or A, E, S, T, 4-Pal, D, G, γE, D-Glu(e), Q or H,
[0081] wherein if X₄₁ is A, E, S, T, 4-Pal, D, G, γE, D-Glu, Q or H, then X₄₂ is absent or G, E, γE, D-Glu, or AEEA,
[0082] wherein if X₄₂ is G, E, γE, D-Glu(e), or AEEA, then X₄₃ is absent or E, γE, or D-Glu,
[0083] wherein if X₄₃ is E, γE, or D-Glu, then X₄₄ is absent or E, wherein if X₄₄ is E then X₄₅ is absent or E, wherein if X₄₅ is E then X₄₆ is absent or E,
[0084] wherein if X₄₀ is absent, then X₄₁ through X₄₆ are also absent,
[0085] wherein if X₄₁ is absent, then X₄₂, through X₄₆ are also absent,
[0086] wherein if X₄₂ is absent, then X₄₃ through X₄₆ are also absent,
[0087] wherein if X₄₃ is absent, then X₄₄ through X₄₆ are also absent, wherein if X₄₄ is absent, then X₄₅ and X₄₆ are also absent; wherein if X₄₅ is absent then X₄₆ is also absent,
[0088] wherein at least one of X₁₇, X₂₀, X₂₄ and X₂₈ is an amino acid with a functional group available for conjugation to a fatty acid,
   [0089] wherein the C-terminal amino acid is optionally amidated; or a pharmaceutically acceptable salt thereof.

[0090] In some embodiments, the amino acid at position X₁₇, X₂₀, X₂₄ or X₂₈ with a functional group available for conjugation to a fatty acid is K, C, E, D or Orn. In some embodiments, the amino acid at position X₁₇, X₂₀, X₂₄ or X₂₈ with a functional group available for conjugation to a fatty acid is K. In some embodiments, the amino acid at position X₁₇, X₂₀, X₂₄ or X₂₈ with a functional group available for conjugation to a fatty acid is Orn. In some embodiments, X₁₀ is F or 4-Pal. In some embodiments, X₁₂ is Orn, K, R or Q.

[0091] In some embodiments, only one of X₁₇, X₂₀, X₂₄ and X₂₈ is an amino acid with a functional group available for conjugation to a fatty acid.

[0092] In some embodiments, one of X₁₇, X₂₀, X₂₄, or X₂₈ is conjugated to a fatty acid, via a direct bond or via a linker between the amino acid and the fatty acid. In some embodiments, one of X₁₇, X₂₀, X₂₄, or X₂₈ is conjugated to a fatty acid via a linker between the amino acid and the fatty acid. In some embodiments, the fatty acid is a C₁₆-C₂₂ fatty acid.

[0093] In some embodiments, none of X₁₇, X₂₀, X₂₄, or X₂₈ is conjugated to a fatty acid.

[0094] In one embodiment, a polypeptide is provided that includes the formula II (SEQ ID NO:5):

YX₂QGTFTSDX₁₀SX₁₂X₁₃LDX₁₆X₁₇AQX₂₀X₂₁FIX₂₄X₂₅LX₂₇
X₂₈X₂₉X₃₀X₃₁SSX₃₄X₃₅X₃₆X₃₇X₃₈X₃₉X₄₀X₄₁X₄₂,

[0095] wherein
   [0096] X₂ is Aib,
   [0097] X₁₀ is F, 4-Pal or F(4CN),
   [0098] X₁₂ is Orn, K, R, Q, Dap or Dab,
   [0099] X₁₃ is αMeL,
   [0100] X₁₆ is K or Orn,
   [0101] X₁₇ is any amino acid with a functional group available for conjugation to a fatty acid,
   [0102] X₂₀ is Aib, αMe-4-Pal or Q,
   [0103] X₂₁ is A, Q or Orn,
   [0104] X₂₄ is E or Q,
   [0105] X₂₅ is W, Y, 4-Pal, αMeY or αMe-4-Pal,
   [0106] X₂₇ is L or I,
   [0107] X₂₈ is E or A,
   [0108] X₂₉ is G, D-Ala or Aib,
   [0109] X₃₀ is A or G,
   [0110] X₃₁ is P, H, S, 4-Pal, E, T, K(Ac) or Hyp,
   [0111] X₃₄ is G or Aib,
   [0112] X₃₅ is A, Aib, E, H or 4-Pal,
   [0113] X₃₆ is P or Hyp,
   [0114] X₃₇ is P or Hyp,
   [0115] X₃₈ is P or Hyp,
   [0116] X₃₉ is E, S, G, T, H, 4-Pal or γE,
   [0117] X₄₀ is absent or G, E or S,
   [0118] wherein if X₄₀ is G, E or S, then X₄₁ is absent or E, S, T, 4-Pal, D, G, Q or H,
   [0119] wherein if X₄₁ is E, S, T, 4-Pal, D, G, Q or H, then X₄₂ is absent or G, E or γE,
   [0120] wherein if X₄₀ is absent, then X₄₁ and X₄₂ are also absent,
   [0121] wherein if X₄₁ is absent, then X₄₂ is also absent,
   [0122] wherein the C-terminal amino acid is optionally amidated; or a pharmaceutically acceptable salt thereof.

[0123] In some embodiments of polypeptides of formula II, X₁₇ is K, C, E or D. In some embodiments, X₁₇ is K. In some embodiments, X₁₀ is F or 4-Pal. In some embodiments, X₁₂ is Orn, K, R or Q.

[0124] In some embodiments, X₁₇ is K and is conjugated to a fatty acid via a direct bond or via a linker between the amino acid and the fatty acid. In some embodiments, X₁₇ is K and is conjugated to a fatty acid via a linker between the amino acid and the fatty acid. In some embodiments, the fatty acid is a C₁₆-C₂₂ fatty acid.

[0125] In some embodiments, X₁₇ is K and is conjugated to a C₁₆-C₂₂ fatty acid via a linker between the X₁₇ amino acid and the C₁₆-C₂₂ fatty acid.

[0126] In one embodiment, a polypeptide is provided that includes the formula II′ (SEQ ID NO:1244):

X₁X₂QGTFTSDX₁₀SX₁₂X₁₃LDX₁₆X₁₇AQX₂₀X₂₁FIX₂₄X₂₅LX₂₇
X₂₈X₂₉X₃₀X₃₁SSX₃₄X₃₅X₃₆X₃₇X₃₈X₃₉X₄₀X₄₁X₄₂X₄₃X₄₄,

wherein
[0127] X₁ is Y or NMeY
[0128] X₂ is Aib,
[0129] X₁₀ is F, 4-Pal or F(4CN),
[0130] X₁₂ is Orn, K, R, I, Q, Dap or Dab,
[0131] X₁₃ is αMeL,
[0132] X₁₆ is K or Orn,
[0133] X₁₇ is any amino acid with a functional group available for conjugation to a fatty acid,
[0134] X₂₀ is Aib, αMe-4-Pal, Q or L-Iva,
[0135] X₂₁ is A, Q or Orn,
[0136] X₂₄ is E or Q,
[0137] X₂₅ is W, Y, 4-Pal, αMeY or αMe-4-Pal,
[0138] X₂₇ is L or I,
[0139] X₂₈ is E, Q or A,
[0140] X₂₉ is G, D-Ala or Aib,
[0141] X₃₀ is A, S or G,
[0142] X₃₁ is P, H, S, 4-Pal, E, T, K(Ac) or Hyp,
[0143] X₃₄ is G or Aib,
[0144] X₃₅ is A, Aib, E, H or 4-Pal,
[0145] X₃₆ is P or Hyp,
[0146] X₃₇ is P or Hyp,
[0147] X₃₈ is P or Hyp,
[0148] X₃₉ is E, S, G, T, H, 4-Pal or γE,
[0149] X₄₀ is absent or G, E, S or D-Glu,
[0150] wherein if X₄₀ is G, E, S or D-Glu, then X₄₁ is absent or E, S, T, 4-Pal, D, G, Q or H,
[0151] wherein if X₄₁ is E, S, T, 4-Pal, D, G, Q or H, then X₄₂ is absent or G, E or γE,
[0152] wherein if X₄₂ is G, E, or γE, then X₄₃ is absent or E,
[0153] wherein if X₄₃ is E, then X₄₄ is absent or E,
[0154] wherein if X₄₀ is absent, then X₄₁, X₄₂, X₄₃, and X₄₄ are also absent,
[0155] wherein if X₄₁ is absent, then X₄₂, X₄₃ and X₄₄ are is also absent,
[0156] wherein if X₄₃ is absent then X₄₄ is also absent,
   wherein the C-terminal amino acid is optionally amidated; or a pharmaceutically acceptable salt thereof.

[0157] In some embodiments of polypeptides of formula II′, X₁₇ is K, C, E or D. In some embodiments, X₁₇ is K. In some embodiments, X₁₀ is F or 4-Pal. In some embodiments, X₁₂ is Orn, K, R or Q.

[0158] In some embodiments, X₁₇ is K and is conjugated to a fatty acid via a direct bond or via a linker between the amino acid and the fatty acid. In some embodiments, X₁₇ is K and is conjugated to a fatty acid via a linker between the amino acid and the fatty acid. In some embodiments, the fatty acid is a C₁₆-C₂₂ fatty acid.

[0159] In some embodiments, X₁₇ is K and is conjugated to a C₁₆-C₂₂ fatty acid via a linker between the X₁₇ amino acid and the C₁₆-C₂₂ fatty acid.

[0160] In some embodiments, none of X₁₇, X₂₀, X₂₄, or X₂₈ is conjugated to a fatty acid.

[0161] In one embodiment, a polypeptide is provided that includes the formula III (SEQ ID NO:6):

X₁X₂QGTX₆TSDX₁₀X₁₁X₁₂X₁₃LDX₁₆X₁₇AX₁₉X₂₀X₂₁FX₂₃X₂₄
X₂₅LX₂₇X₂₈X₂₉GX₃₁SSX₃₄X₃₅X₃₆X₃₇X₃₈X₃₉X₄₀X₄₁,

[0162] wherein
[0163] X₁ is Y, NMeY or H,
[0164] X₂ is Aib,
[0165] X₆ is F, αMeF or αMeF(2F),
[0166] X₁₀ is F, 3-Pal, 4-Pal, F(4CN), F(4NO₂) or Y,
[0167] X₁₁ is S or αMeS,
[0168] X₁₂ is Orn, K, R, Q, Dap, S, E or I,
[0169] X₁₃ is αMeL, I or L,
[0170] X₁₆ is K, Orn, A or E,
[0171] X₁₇ is any amino acid with a functional group available for conjugation to a fatty acid, A, I or Q,
[0172] X₁₉ is A or Q,
[0173] X₂₀ is any amino acid with a functional group available for conjugation to a fatty acid Aib, Q, R or αMe-4-Pal,
[0174] X₂₁ is A, Aad, Aib, S, N, Q, E, T or Orn,
[0175] X₂₃ is I or V,
[0176] X₂₄ is any amino acid with a functional group available for conjugation to a fatty acid E, D-Glu, Q or N,
[0177] X₂₅ is W, Y, F, 4-Pal, αMeY or αMe-4-Pal,
[0178] X₂₇ is L, I, E, V, A, Q or S,
[0179] X₂₈ is any amino acid with a functional group available for conjugation to a fatty acid, E or A,
[0180] X₂₉ is G, Aib, T, D-Ala or A,
[0181] X₃₁ is P or E,
[0182] X₃₄ is G or Aib,
[0183] X₃₅ is A or E,
[0184] X₃₆ is P,
[0185] X₃₇ is P or E,
[0186] X₃₈ is P,
[0187] X₃₉ is E, S, G or A,
[0188] X₄₀ is absent or G, E, S, A or T,
[0189] wherein if X₄₀ is G, E, S, A or T, then X₄₁ is absent or is E, S, D or G,
[0190] wherein if X₄₁ is E, S, D or G, then X₄₂ is absent or G, E or γE,
[0191] wherein if X₄₀ is absent, then X₄₁ and X₄₂ are also absent,
[0192] wherein if X₄₁ is absent, then X₄₂ is also absent,
[0193] wherein if X₁₀ is F, 3-Pal, 4-Pal, F(4CN), F(4NO₂), then X₁₂ is I,
[0194] wherein at least one of X₁₇, X₂₀, X₂₄ or X₂₈ is an amino acid with a functional group available for conjugation to a fatty acid,
[0195] wherein the C-terminal amino acid is optionally amidated;
[0196] or a pharmaceutically acceptable salt thereof.

[0197] In some embodiments of Formula III, the amino acid at position X₁₇, X₂₀, X₂₄ Or X₂₈ with a functional group available for conjugation to a fatty acid is K, C, E or D. In some embodiments, the amino acid at position X₁₇, X₂₀, X₂₄ or X₂₈ with a functional group available for conjugation to a fatty acid is K. In some embodiments, X₁₀ is F, 3-Pal, 4-Pal, F(4CN) or F(4NO₂) and X₁₂ is I. In some embodiments, X₁₀ is Y and X₁₂ is Om, K, R, Q, Dap, S, E or I.

[0198] In some embodiments, only one of X₁₇, X₂₀, X₂₄ and X₂₈ is an amino acid with a functional group available for conjugation to a fatty acid.

[0199] In some embodiments, only one of X₁₇, X₂₀, X₂₄, or X₂₈ is conjugated to a fatty acid, via a direct bond or via a linker between the amino acid and the fatty acid. In some embodiments, only one of X₁₇, X₂₀, X₂₄, or X₂₈ is conjugated to a fatty acid via a linker between the amino acid and the fatty acid. In some embodiments, the fatty acid is a C₁₆-C₂₂ fatty acid.

[0200] In some embodiments, only one of X₁₇, X₂₀, X₂₄, or X₂₈ is K and is conjugated to a C₁₆-C₂₂ fatty acid via a linker between the amino acid and the C₁₆-C₂₂ fatty acid.

[0201] In one embodiment, a polypeptide is provided that includes the formula III′ (SEQ ID NO:1245):

X₁X₂QX₄TX₆TSDX₁₀X₁₁X₁₂X₁₃LX₁₅X₁₆X₁₇AX₁₉X₂₀X₂₁FX₂₃
X₂₄X₂₅LX₂₇X₂₈X₂₉GX₃₁X₃₂SX₃₄X₃₅PX₃₇PX₃₉X₄₀X₄₁X₄₂
X₄₃X₄₄X₄₅X₄₆,

[0202] wherein
[0203] X₁ is Y, NMeY or H,
[0204] X₂ is Aib,
[0205] X₄ is G or D-Ala,
[0206] X₆ is F, αMeF or αMeF(2F),
[0207] X₁₀ is F, 3-Pal, 4-Pal, F(4CN), F(4NO₂) or Y,
[0208] X₁₁ is S or αMeS,
[0209] X₁₂ is Or, K, R, Q, Dap, S, E or I,
[0210] X₁₃ is αMeL, I or L,
[0211] X₁₅ is D or E,
[0212] X₁₆ is K, Orn, A or E,
[0213] X₁₇ is any amino acid with a functional group available for conjugation to a fatty acid, A, I or Q or Orn,
[0214] X₁₉ is A or Q,
[0215] X₂₀ is any amino acid with a functional group available for conjugation to a fatty acid, Aib, Q, R or αMe-4-Pal,
[0216] X₂₁ is A, Aad, Aib, S, N, Q, E, T or Orn,
[0217] X₂₃ is I or V, X₂₄ is any amino acid with a functional group available for conjugation to a fatty acid E, D-Glu, Q, N or D-Gln,
[0218] X₂₅ is W, Y, F, 4-Pal, αMeY or αMe-4-Pal,
[0219] X₂₇ is L, I, E, V, A, Aad, T, Q or S,
[0220] X₂₈ is any amino acid with a functional group available for conjugation to a fatty acid, E or A,
[0221] X₂₉, is G, Aib, T, D-Ala or A,
[0222] X₃₁ is P or E,
[0223] X₃₂ is S or P,
[0224] X₃₄ is G or Aib,
[0225] X₃₅ is A, D or E,
[0226] X₃₇ is P or E,
[0227] X₃₉ is E, S, G, A, T or Orn,
[0228] X₄₀ is absent or G, E, S, A or T,
[0229] wherein if X₄₀ is G, E, S, A, T or D-Glu, then X₄₁ is absent or is E, S, D, G, Q, T, A, γE or D-Glu,
[0230] wherein if X₄₁ is E, S, D, G, Q, T, A, γE or D-Glu, then X₄₂ is absent or G, E, D-Glu or γE,
[0231] wherein if X₄₂ is G, E, D-Glu or γE, then X₄₃ is absent or E, γE, or D-Glu,
[0232] wherein if X₄₃ is E, γE, or D-Glu, then X₄₄ is absent or E,
[0233] wherein if X₄₄ is E then X₄₅ is absent or E,
[0234] wherein if X₄₅ is E then X₄₆ is absent or E,
[0235] wherein if X₄₀ is absent, then X₄₁ through X₄₆ are also absent,
[0236] wherein if X₄₁ is absent, then X₄₂ through X₄₆ are also absent,
[0237] wherein if X₄₂ is absent, then X₄₃ through X₄₆ are also absent,
[0238] wherein if X₄₃ is absent, then X₄₄ through X₄₆ are also absent,
[0239] wherein if X₄₄ is absent, then X₄₅ and X₄₆ are also absent,
[0240] wherein if X₄₅ is absent then X₄₆ is also absent,
[0241] wherein the polypeptide comprises at least one of the following: X₆ is αMeF or αMeF(2F); X₁₀ is F, 3-Pal, 4-Pal, F(4CN) or F(4NO₂); X₁₁ is αMeS; X₁₃ is αMeL; X₂₄ is D-Glu; and/or X₂₅ is αMeY,
[0242] wherein if X₁₀ is F, 3-Pal, 4-Pal, F(4CN), or F(4NO₂), then X₁₂ is I,
[0243] and wherein at least one of X₁₇, X₂₀, X₂₄ Or X₂₈ is an amino acid with a functional group available for conjugation to a fatty acid,
[0244] wherein the C-terminal amino acid is optionally amidated; or a pharmaceutically acceptable salt thereof.

[0245] In some embodiments of Formula III′, the amino acid at position X₁₇, X₂₀, X₂₄ or X₂₈ with a functional group available for conjugation to a fatty acid is K, C, E, D or Om. In some embodiments, the amino acid at position X₁₇, X₂₀, X₂₄ or X₂₈ with a functional group available for conjugation to a fatty acid is K. In some embodiments, the amino acid at position X₁₇, X₂₀, X₂₄ or X₂₈ with a functional group available for conjugation to a fatty acid is Orn. In some embodiments, X₁₀ is F, 3-Pal, 4-Pal, F(4CN) or F(4NO₂) and X₁₂ is I. In some embodiments, X₁₀ is Y and X₁₂ is Orn, K, R, Q, Dap, S, E or I.

[0246] In some embodiments, only one of X₁₇, X₂₀, X₂₄ and X₂₈ is an amino acid with a functional group available for conjugation to a fatty acid.

[0247] In some embodiments, one of X₁₇, X₂₀, X₂₄, or X₂₈ is conjugated to a fatty acid, via a direct bond or via a linker between the amino acid and the fatty acid. In some embodiments, one of X₁₇, X₂₀, X₂₄, or X₂₈ is conjugated to a fatty acid via a linker between the amino acid and the fatty acid. In some embodiments, the fatty acid is a C₁₆-C₂₂ fatty acid.

In some embodiments, only one of X₁₇, X₂₀, X₂₄, or X₂₈ is K and is conjugated to a C₁₆-C₂₂ fatty acid via a linker between the amino acid and the C₁₆-C₂₂ fatty acid. In some embodiments, none of X₁₇, X₂₀, X₂₄, or X₂₈ is conjugated to a fatty acid.

[0248] In another embodiment, provided herein is a pharmaceutical composition that comprises a polypeptide described herein or a pharmaceutically acceptable salt thereof and at least one pharmaceutically acceptable carrier, diluent, or excipient. In some embodiments, the pharmaceutical composition is formulated for subcutaneous administration. In some embodiments, the pharmaceutical composition is formulated for oral administration.

[0249] In another embodiment, a method is provided for treating a disease or disorder including obesity, chronic weight management, type 2 diabetes mellitus, NAFLD, NASH, dyslipidemia, metabolic disorder, CKD, OA, OSA and PCOS. Another embodiment provides a method for providing non-therapeutic weight loss comprising administering to a subject in need thereof, an effective amount of a polypeptide described herein or a pharmaceutically acceptable salt thereof. Such methods can include at least a step of administering to an individual in need thereof an effective amount of a polypeptide a pharmaceutically acceptable salt thereof described herein.

[0250] In another embodiment, a polypeptide as described herein is provided for use in therapy. For example, a polypeptide as described herein is provided for use in treating a disease or disorder including obesity, chronic weight management, type 2 diabetes mellitus, NAFLD, NASH, dyslipidemia, metabolic disorder, CKD, OA, OSA and/or PCOS.

[0251] In another embodiment, there is provided the use of a polypeptide as described herein in the manufacture of a medicament for treating a disease or disorder including obesity, chronic weight management, type 2 diabetes mellitus, NAFLD, NASH, dyslipidemia, metabolic disorder, CKD, OA, OSA and/or PCOS.

### DETAILED DESCRIPTION

[0252] Unless defined otherwise, all technical and scientific terms used herein have the same meaning as commonly understood by one of skill in the art to which the disclosure pertains. Although any methods and materials similar to or equivalent to those described herein can be used in the practice or testing of the polypeptides, pharmaceutical compositions, and methods, the preferred methods and materials are described herein.

[0253] Moreover, reference to an element by the indefinite article “a” or “an” does not exclude the possibility that more than one element is present, unless the context clearly requires that there be one and only one element. The indefinite article “a” or “an” thus usually means “at least one.”

[0254] GIP is a 42-amino acid peptide (SEQ ID NO:1) and is an incretin, which plays a physiological role in glucose homeostasis by stimulating insulin secretion from pancreatic beta cells in the presence of glucose.

[0255] GLP-1 is a 36-amino acid peptide and also is an incretin, which stimulates glucose-dependent insulin secretion and which has been shown to prevent hyperglycemia in diabetics. The major biologically active fragment of GLP-1 is produced as a 30-amino acid, C-terminal amidated peptide (GLP-17-36) (SEQ ID NO:2).

[0256] Glucagon is a 29-amino acid peptide (SEQ ID NO:3) that helps maintain blood glucose by binding to and activating glucagon receptors on hepatocytes, causing the liver to release glucose—stored in the form of glycogen—through a process called glycogenolysis.

[0257] In addition to T2DM, incretins and analogs thereof having activity at one or more of the GIP, GLP-1 and/or glucagon receptors have been described as having a potential for therapeutic value in a number of other conditions, diseases or disorders, including, for example, obesity, NAFLD and NASH, dyslipidemia, metabolic syndrome, bone-related disorders, and neurodegenerative and/or cognitive disorders such as Alzheimer's disease and Parkinson's disease. See. e.g., Jall et al. (2017) Mol. Metab. 6:440-446; Carbone et al. (2016) J. Gastroenterol. Hepatol. 31:23-31: Finan et al. (2016) Trends Mol. Med. 22:359-376; Choi et al. (2017) Potent body weight loss and efficacy in a NASH animal model by a novel long-acting GLP-1 Glucagon GIP triple-agonist (HM15211), ADA Poster 1139-P; Ding (2008) J. Bone Miner. Res. 23:536-543: Tai et al. (2018) Brain Res. 1678:64-74; Müller et al. (2017) Physiol. Rev. 97:721-766; Finan et al. (2013) Sci. Transl. Med. 5:209; Hölscher (2014) Biochem. Soc. Trans. 42:593-600.

[0258] As used herein, “about” means within a statistically meaningful range of a value or values such as, for example, a stated concentration, length, molecular weight, pH, sequence identity, time frame, temperature or volume. Such a value or range can be within an order of magnitude typically within 20%, more typically within 10%, and even more typically within 5% of a given value or range. The allowable variation encompassed by “about” will depend upon the particular system under study, and can be readily appreciated by one of skill in the art.

[0259] As used herein, and in reference to one or more of the GIP, GLP-1 or glucagon receptors, “activity,” “activate,” “activating” and the like means a capacity of a compound, such as the polypeptides described herein, to bind to and induce a response at the receptor(s), as measured using assays known in the art, such as the in vitro assays described below:

[0260] As used herein, “amino acid with a functional group available for conjugation” means any natural (coded) or non-natural (non-coded) amino acid with a functional group that may be conjugated to fatty acid directly or by way of, for example, a linker. Examples of such functional groups include, but are not limited to, alkynyl, alkenyl, amino, azido, bromo, carboxyl, chloro, iodo, and thiol groups. Examples of natural amino acids including such functional groups include K (amino), C (thiol), E (carboxyl) and D (carboxyl).

[0261] As used herein, “conservative amino acid substitution” means substitution of an amino acid with an amino acid having similar characteristics (e.g., charge, side-chain size, hydrophobicity/hydrophilicity, backbone conformation and rigidity, etc.) and having minimal impact on the biological activity of the resulting substituted peptide or polypeptide. Conservative substitutions of functionally similar amino acids are well known in the art and thus need not be exhaustively described herein.

[0262] As used herein, “C₁₆-C₂₂ fatty acid” means a carboxylic acid having between 16 and 22 carbon atoms. The C₁₆-C₂₂ fatty acid suitable for use herein can be a saturated monoacid or a saturated diacid. As used herein, “saturated” means the fatty acid contains no carbon-carbon double or triple bonds.

[0263] As used herein, “effective amount” means an amount, concentration or dose of one or more polypeptides described herein, or a pharmaceutically acceptable salt thereof which, upon single or multiple dose administration to an individual in need thereof, provides a desired effect in such an individual under diagnosis or treatment. An effective amount can be readily determined by one of skill in the art through the use of known techniques and by observing results obtained under analogous circumstances. In determining the effective amount for an individual, a number of factors are considered including, but not limited to, the species of mammal: its size, age and general health: the specific disease or disorder involved: the degree of or involvement of or the severity of the disease or disorder: the response of the individual patient: the particular polypeptide administered: the mode of administration; the bioavailability characteristics of the preparation administered: the dose regimen selected: the use of concomitant medication; and other relevant circumstances.

[0264] As used herein, “extended duration of action” means that binding affinity and activity for a polypeptide continues for a period of time greater than native human GIP, GLP-1 and glucagon peptides, allowing for dosing at least as infrequently as once daily or even thrice-weekly, twice-weekly or once-weekly. The time action profile of the polypeptide may be measured using known pharmacokinetic test methods such as those utilized in the examples below.

[0265] As used herein, “polypeptide” or “peptide” means a polymer of amino acid residues. The term applies to polymers comprising naturally occurring amino acids and polymers comprising one or more non-naturally occurring amino acids.

[0266] As used herein, “individual in need thereof” means a mammal, such as a human, with a condition, disease, disorder or symptom requiring treatment or therapy, including for example, those listed herein.

[0267] As used herein, “treat,” “treating,” “to treat” and the like mean restraining, slowing, stopping or reversing the progression or severity of an existing condition, disease, disorder or symptom.

[0268] As used herein, and with reference to a polypeptide, “triple agonist activity” means a polypeptide with activity at each of the GIP, GLP-1 and glucagon receptors, especially a polypeptide having sufficient activity at each receptor to provide the benefits of agonism of that receptor while avoiding unwanted side effects associated with too much activity.

[0269] The polypeptides having triple agonist activity (Also referred herein as “GGG polypeptides”) have extended duration of action at the GIP, GLP-1 and glucagon receptors, which advantageously allows for dosing as infrequently as once-a-day, thrice-weekly, twice-weekly or once-a-week.

[0270] As used herein, the term “Sequence identity” refers to the degree of similarity between two sequences. The degree of sequence identity between two polypeptides may be expressed as a percent, calculated as follows:

% Sequence identity=100%*(number of identical amino acids)/(length of the shortest common sequence).

[0271] The structural features of the polypeptides described herein result in them having appropriate activity at each of the GIP, GLP-1 and glucagon receptors to obtain the favorable effects of activity at each receptor (i.e., triple agonist activity), but not so much activity at any one receptor to either overwhelm the activity at the other two receptors or result in undesirable side effects when administered at a dose sufficient to result in activity at all three receptors. In some embodiments, the polypeptides described herein are partial agonists at the GLP-1 receptor showing agonism of 80% or less compared to the native GLP-1₇₋₃₆ (SEQ ID NO:2) as demonstrated by the HEK293 cell GLP-1 receptor internalization assay described herein. In other embodiments, the polypeptides described herein are full agonists at the GLP-1 receptor showing agonism of ≥80% compared to the native GLP-1₇₋₃₆ (SEQ ID NO:2) as demonstrated by the HEK293 cell GLP-1 receptor internalization assay described herein. In some embodiments, the polypeptides described herein have greater potency at each of the glucagon, GIP and GLP-1 receptors as compared to native glucagon (SEQ ID NO:3), GIP (SEQ ID NO:1) and GLP-1₇₋₃₆ (SEQ ID NO:2).

[0272] The structural features of the polypeptides described herein also result in polypeptides having many other beneficial attributes relevant to their developability as therapeutic treatments, including for improving solubility of the analogs in near neutral pH aqueous solutions, improving chemical and physical formulation stability, improving peptide membrane permeability in the presence of a permeation enhancer, extending the pharmacokinetic profile, and minimizing potential for injection site reaction or immunogenicity.

[0273] It should be noted that the combination of beneficial characteristics of exemplary analogs described herein is not the result of any single modification in isolation but is instead achieved through the novel combinations of the structural features described herein.

### Polypeptide Sequences

[0274] In one embodiment, provided herein is a polypeptide that comprises formula I (SEQ ID NO:4):

X₁X₂QGTX₆TSDX₁₀X₁₁X₁₂X₁₃LDX₁₆X₁₇AX₁₉X₂₀X₂₁FX₂₃X₂₄
X₂₅LX₂₇X₂₈X₂₉X₃₀X₃₁SSX₃₄X₃₅X₃₆X₃₇X₃₈X₃₉X₄₀X₄₁X₄₂,

wherein
[0275] X₁ is Y, NMeY or H,
[0276] X₂ is Aib,
[0277] X₆ is F, αMeF or αMeF(2F),
[0278] X₁₀ is F, 4-Pal, F(4CN), 3-Pal, F(4NO₂) or Y,
[0279] X₁₁ is S or αMeS,
[0280] X₁₂ is Orn, K, R, Q, Dap, Dab, S, E or I,
[0281] X₁₃ is αMeL, I or L,
[0282] X₁₆ is K, Orn, A or E,
[0283] X₁₇ is any amino acid with a functional group available for conjugation to a fatty acid, A, I or Q,
[0284] X₁₉ is Q or A,
[0285] X₂₀ is any amino acid with a functional group available for conjugation to a fatty acid, Aib, αMe-4-pal, Q or R,
[0286] X₂₁ is A, Q, Orn, Aad, Aib, S, N, E or T,
[0287] X₂₃ is I or V,
[0288] X₂₄ is any amino acid with a functional group available for conjugation to a fatty acid, E, Q, D-Glu or N,
[0289] X₂₅ is W, Y, F, 4-Pal, αMeY or αMe-4-pal,
[0290] X₂₇ is L, I, E, V, A, Q or S,
[0291] X₂₈ is any amino acid with a functional group available for conjugation to a fatty acid, E or A,
[0292] X₂₉ is G, D-Ala, Aib, T or A,
[0293] X₃₀ is A or G,
[0294] X₃₁ is P, H, S, 4-Pal, E, T, K(Ac) or Hyp,
[0295] X₃₄ is G or Aib,
[0296] X₃₅ is A, Aib, E, H or 4-Pal,
[0297] X₃₆ is P or Hyp,
[0298] X₃₇ is P, Hyp or E,
[0299] X₃₈ is P or Hyp,
[0300] X₃₉ is E, S, G, T, H, 4-Pal, γE or A,
[0301] X₄₀ is absent or G, E, S, A or T,
[0302] wherein if X₄₀ is G, E, S, A or T, then X₄₁ is absent or E, S, T, 4-Pal, D, G, Q or H,
[0303] wherein if X₄₁ is E, S, T, 4-Pal, D, G, Q or H, then X₄₂ is absent or G, E or γE,
[0304] wherein if X₄₀ is absent, then X₄₁ and X₄₂ are also absent,
[0305] wherein if X₄₁ is absent, then X₄₂ is also absent,
[0306] wherein at least one of X₁₇, X₂₀, X₂₄ and X₂₈ is an amino acid with a functional group available for conjugation to a fatty acid,
[0307] and wherein the C-terminal amino acid is optionally amidated; or a pharmaceutically acceptable salt thereof.

[0308] If X₄₀ absent, then X₄₁ and X₄₂ are also absent and the polypeptide comprises a 39 amino acid sequence. If X₄₁ absent, then X₄₂ is also absent and the polypeptide comprises a 40 amino acid sequence. If X₄₂ is absent, then the polypeptide comprises a 41 amino acid sequence. If none of X₄₀, X₄₁ and X₄₂ are absent (in other words all of X₄₀, X₄₁ and X₄₂ are present), the polypeptide comprises a 42 amino acid sequence.

[0309] In one embodiment, X₄₀ is G, E, S, A or T, X₄₁ is absent, and X₄₂ is absent. In such embodiments, the polypeptide comprises a 40 amino acid sequence. In one embodiment, X₄₀ is G, E, S, A or T, X₄₁ is E, S, T, 4-Pal, D, G, Q or H, and X₄₂ is absent. In such embodiments, the polypeptide comprises a 41 amino acid sequence. In one embodiment, X₄₀ is G, E, S, A or T, X₄₁ is E, S, T, 4-Pal, D, G, Q or H, and X₄₂ is G, E or γE. In such embodiments, the polypeptide comprises a 42 amino acid sequence.

[0310] In some embodiments, polypeptides of the present invention include at position X₁₇, X₂₀, X₂₄ or X₂₈ any amino acid (natural or non-natural) with a functional group available for conjugation to a fatty acid. In certain embodiments, the amino acid with a functional group available for conjugation to a fatty acid is K, C, E or D. In particularly preferred embodiments the amino acid is K and the conjugation is to the epsilon-amino group of the K side-chain.

[0311] Thus, in some embodiments, the amino acid at position X₁₇, X₂₀, X₂₄ or X₂₈ with a functional group available for conjugation to a fatty acid is K, C, E or D. In some embodiments, the amino acid at position X₁₇, X₂₀, X₂₄ or X₂₈ with a functional group available for conjugation to a fatty acid is K.

[0312] In some embodiments, X₁₀ is F or 4-Pal. In some embodiments, X₁₀ is F. In some embodiments, X₁₀ is 4-Pal. In some embodiments, X₁₂ is Orn, K, R or Q. In some embodiments, X₁₂ is Orn. In some embodiments, X₁₂ is K. In some embodiments, X₁₂ is R. In some embodiments, X₁₂ is Q.

[0313] In one embodiment, only one of X₁₇, X₂₀, X₂₄ and X₂₈ is an amino acid with a functional group available for conjugation to a fatty acid. In one embodiment, the conjugation is an acylation.

[0314] In some embodiments, only one of X₁₇, X₂₀, X₂₄ and X₂₈ is conjugated to a fatty acid. In some embodiments, only one of X₁₇, X₂₀, X₂₄ and X₂₈ is conjugated to a fatty acid optionally via a linker between the amino acid and the fatty acid. Thus, in some embodiments, only one of X₁₇, X₂₀, X₂₄ and X₂₈ is conjugated to a fatty acid via a direct bond between the amino acid and the fatty acid or via a linker between the amino acid and the fatty acid. In some embodiments, the fatty acid is a C₁₆-C₂₂ fatty acid.

[0315] Thus, in one embodiment, X₁₇ is K and is conjugated to a C₁₆-C₂₂ fatty acid via a direct bond or via a linker between the amino acid and the C₁₆-C₂₂ fatty acid. In one embodiment, X₁₇ is K and is conjugated to a C₁₆-C₂₂ fatty acid via a linker between the amino acid and the C₁₆-C₂₂ fatty acid. In such embodiments, X₂₀ is Aib, αMe-4-pal, Q or R, X₂₄ is E, Q, D-Glu or N, and X₂₈ is E or A. In an embodiment, the conjugation is to the epsilon-amino group of the K side-chain.

[0316] In one embodiment, X₂₀ is K and is conjugated to a C₁₆-C₂₂ fatty acid via a direct bond or via a linker between the amino acid and the C₁₆-C₂₂ fatty acid. In one embodiment, X₂₀ is K and is conjugated to a C₁₆-C₂₂ fatty acid via a linker between the amino acid and the C₁₆-C₂₂ fatty acid. In such embodiments, X₁₇ is A, I or Q, X₂₄ is E, Q, D-Glu or N, and X₂₈ is E or A. In an embodiment, the conjugation is to the epsilon-amino group of the K side-chain.

[0317] In one embodiment, X₂₄ is K and is conjugated to a C₁₆-C₂₂ fatty acid via a direct bond or via a linker between the amino acid and the C₁₆-C₂₂ fatty acid. In one embodiment, X₂₄ is K and is conjugated to a C₁₆-C₂₂ fatty acid via a linker between the amino acid and the C₁₆-C₂₂ fatty acid. In such embodiments, X₁₇ is A, I or Q, X₂₀ is Aib, αMe-4-pal, Q or R, and X₂₈ is E or A. In an embodiment, the conjugation is to the epsilon-amino group of the K side-chain.

[0318] In one embodiment, X₂₈ is K and is conjugated to a C₁₆-C₂₂ fatty acid via a direct bond or via a linker between the amino acid and the C₁₆-C₂₂ fatty acid. In one embodiment, X₂₈ is K and is conjugated to a C₁₆-C₂₂ fatty acid via a linker between the amino acid and the C₁₆-C₂₂ fatty acid. In such embodiments, X₁₇ is A, I or Q, X₂₀ is Aib, αMe-4-pal, Q or R, and X₂₄ is E, Q, D-Glu or N. In an embodiment, the conjugation is to the epsilon-amino group of the K side-chain.

[0319] In one embodiment, provided herein is a polypeptide that comprises Formula I′ (SEQ ID NO:1243):

X₁X₂QX₄TX₆TSDX₁₀X₁₁X₁₂X₁₃LX₁₅X₁₆X₁₇AX₁₉X₂₀X₂₁FX₂₃
X₂₄X₂₅LX₂₇X₂₈X₂₉X₃₀X₃₁X₃₂SX₃₄X₃₅X₃₆X₃₇X₃₈X₃₉X₄₀
X₄₁X₄₂X₄₃X₄₄X₄₅X₄₆,

wherein:
[0320] X₁ is Y, NMeY or H,
[0321] X₂ is Aib,
[0322] X₄ is G or D-Ala,
[0323] X₆ is F, αMeF or αMeF(2F),
[0324] X₁₀ is F, 4-Pal, F(4CN), 3-Pal, F(4NO₂) or Y,
[0325] X₁₁ is S or αMeS,
[0326] X₁₂ is Orn, K, R, Q, Dap, Dab, S, E or I,
[0327] X₁₃ is αMeL, I or L,
[0328] X₁₅ is D or E,
[0329] X₁₆ is K, Orn, A or E,
[0330] X₁₇ is any amino acid with a functional group available for conjugation to a fatty acid, A, I, Q or Orn,
[0331] X₁₉ is Q or A,
[0332] X₂₀ is any amino acid with a functional group available for conjugation to a fatty acid, Aib, αMe-4-Pal, Q, R or L-Iva,
[0333] X₂₁ is A, Q, Orn, Aad, Aib, S, N, E or T,
[0334] X₂₃ is I or V,
[0335] X₂₄ is any amino acid with a functional group available for conjugation to a fatty acid, E, Q, D-Glu, N or D-Gln,
[0336] X₂₅ is W, Y, F, 4-Pal, αMeY or αMe-4-Pal,
[0337] X₂₇ is L, I, E, V, A, Q, S, T or Aad,
[0338] X₂₈ is any amino acid with a functional group available for conjugation to a fatty acid, E, Q or A,
[0339] X₂₉ is G, D-Ala, Aib, T or A,
[0340] X₃₀ is A, S or G,
[0341] X₃₁ is P, H, S, 4-Pal, E, T, K(Ac) or Hyp (hydroxyproline),
[0342] X₃₂ is S or P
[0343] X₃₄ is G or Aib,
[0344] X₃₅ is A, Aib, E, D, H or 4-Pal or Om,
[0345] X₃₆ is P or Hyp,
[0346] X₃₇ is P, Hyp or E,
[0347] X₃₈ is P or Hyp,
[0348] X₃₉ is E, S, G, T, H, 4-Pal, γE or A or Orn,
[0349] X₄₀ is absent or G, E, S, A, T, or D-Glu,
[0350] wherein if X₄₀ is G, E, S, A or T, then X₄₁ is absent or A, E, S, T, 4-Pal, D, G, γE, D-Glu, Q or H,
[0351] wherein if X₄₁ is A, E, S, T, 4-Pal, D, G, γE, D-Glu, Q or H, then X₄₂ is absent or G, E, γE, D-Glu, or AEEA,
[0352] wherein if X₄₂ is G, E, γE, D-Glu(e), or AEEA, then X₄₃ is absent or E, γE, or D-Glu,
[0353] wherein if X₄₃ is E, γE, or D-Glu, then X₄₄ is absent or E, wherein if X₄₄ is E then X₄₅ is absent or E, wherein if X₄₅ is E then X₄₆ is absent or E,
[0354] wherein if X₄₀ is absent, then X₄₁ through X₄₆ are also absent,
[0355] wherein if X₄₁ is absent, then X₄₂, through X₄₆ are also absent,
[0356] wherein if X₄₂ is absent, then X₄₃ through X₄₆ are also absent,
[0357] wherein if X₄₃ is absent, then X₄₄ through X₄₆ are also absent, wherein if X₄₄ is absent, then X₄₅ and X₄₆ are also absent; wherein if X₄₅ is absent then X₄₆ is also absent,
[0358] wherein at least one of X₁₇, X₂₀, X₂₄ and X₂₈ is an amino acid with a functional group available for conjugation to a fatty acid,
[0359] wherein the C-terminal amino acid is optionally amidated; or a pharmaceutically acceptable salt thereof.

[0360] If X₄₀ absent, then X₄₁ through X₄₆ are also absent and the polypeptide comprises a 39 amino acid sequence backbone. If X₄₁ absent, then X₄₂ through X₄₆ are also absent and the polypeptide comprises a 40 amino acid sequence backbone. If X₄₂ is absent, then the polypeptide comprises a 41 amino acid sequence backbone. If X₄₃ is absent, then the polypeptide comprises a 42 amino acid sequence backbone. If X₄₄ is absent, then the polypeptide comprises a 43 amino acid sequence backbone. If X₄₅ is absent, then the polypeptide comprises a 44 amino acid sequence backbone. If X₄₆ is absent, then the polypeptide comprises a 45 amino acid sequence backbone. If none of X₄₀ through X₄₆ are absent (in other words all of X₄₀ through X₄₆ are present), the polypeptide comprises a 46 amino acid sequence backbone.

[0361] In one embodiment, X₄₀ is G, E, S, A or T, X₄₁ is absent, and X₄₂ is absent. In such embodiments, the polypeptide comprises a 40 amino acid sequence. In one embodiment, X₄₀ is G, E, S, A or T, X₄₁ is E, S, T, 4-Pal, D, G, Q or H, and X₄₂ is absent. In such embodiments, the polypeptide comprises a 41 amino acid sequence. In one embodiment, X₄₀ is G, E, S, A or T, X₄₁ is E, S, T, 4-Pal, D, G, Q or H, and X₄₂ is G, E or γE. In such embodiments, the polypeptide comprises a 42 amino acid sequence.

[0362] In some embodiments, polypeptides of the present invention include at position X₁₇, X₂₀, X₂₄ or X₂₈ any amino acid (natural or non-natural) with a functional group available for conjugation to a fatty acid. In certain embodiments, the amino acid with a functional group available for conjugation to a fatty acid is K, C, E or D. In certain embodiments the amino acid is K, and a fatty acid is conjugated to the epsilon-amino group of the K side-chain.

[0363] Thus, in some embodiments, the amino acid at position X₁₇, X₂₀, X₂₄ or X₂₈ with a functional group available for conjugation to a fatty acid is K, C, E or D. In some embodiments, the amino acid at position X₁₇, X₂₀, X₂₄ or X₂₈ with a functional group available for conjugation to a fatty acid is K.

[0364] In some embodiments, X₁₀ is F or 4-Pal. In some embodiments, X₁₀ is F. In some embodiments, X₁₀ is 4-Pal. In some embodiments, X₁₂ is Orn, K, R or Q. In some embodiments, X₁₂ is Orn. In some embodiments, X₁₂ is K. In some embodiments, X₁₂ is R. In some embodiments, X₁₂ is Q.

[0365] In one embodiment, only one of X₁₇, X₂₀, X₂₄ and X₂₈ is an amino acid with a functional group available for conjugation to a fatty acid. In one embodiment, the conjugation is an acylation.

[0366] In some embodiments, only one of X₁₇, X₂₀, X₂₄ and X₂₈ is conjugated to a fatty acid. In some embodiments, only one of X₁₇, X₂₀, X₂₄ and X₂₈ is conjugated to a fatty acid optionally via a linker between the amino acid and the fatty acid. Thus, in some embodiments, only one of X₁₇, X₂₀, X₂₄ and X₂₈ is conjugated to a fatty acid via a direct bond between the amino acid and the fatty acid or via a linker between the amino acid and the fatty acid. In some embodiments, the fatty acid is a C₁₆-C₂₂ fatty acid.

[0367] Thus, in one embodiment, X₁₇ is K and is conjugated to a C₁₆-C₂₂ fatty acid via a direct bond or via a linker between the amino acid and the C₁₆-C₂₂ fatty acid. In one embodiment, X₁₇ is K and is conjugated to a C₁₆-C₂₂ fatty acid via a linker between the amino acid and the C₁₆-C₂₂ fatty acid. In such embodiments, X₂₀ is Aib, αMe-4-pal, Q or R, X₂₄ is E, Q, D-Glu or N, and X₂₈ is E or A. In an embodiment, the conjugation is to the epsilon-amino group of the K side-chain.

[0368] In one embodiment, X₂₀ is K and is conjugated to a C₁₆-C₂₂ fatty acid via a direct bond or via a linker between the amino acid and the C₁₆-C₂₂ fatty acid. In one embodiment, X₂₀ is K and is conjugated to a C₁₆-C₂₂ fatty acid via a linker between the amino acid and the C₁₆-C₂₂ fatty acid. In such embodiments, X₁₇ is A, I or Q, X₂₄ is E, Q, D-Glu or N, and X₂₈ is E or A. In an embodiment, the conjugation is to the epsilon-amino group of the K side-chain.

[0369] In one embodiment, X₂₄ is K and is conjugated to a C₁₆-C₂₂ fatty acid via a direct bond or via a linker between the amino acid and the C₁₆-C₂₂ fatty acid. In one embodiment, X₂₄ is K and is conjugated to a C₁₆-C₂₂ fatty acid via a linker between the amino acid and the C₁₆-C₂₂ fatty acid. In such embodiments, X₁₇ is A, I or Q, X₂₀ is Aib, αMe-4-pal, Q or R, and X₂₈ is E or A. In an embodiment, the conjugation is to the epsilon-amino group of the K side-chain.

[0370] In one embodiment, X₂₈ is K and is conjugated to a C₁₆-C₂₂ fatty acid via a direct bond or via a linker between the amino acid and the C₁₆-C₂₂ fatty acid. In one embodiment, X₂₈ is K and is conjugated to a C₁₆-C₂₂ fatty acid via a linker between the amino acid and the C₁₆-C₂₂ fatty acid. In such embodiments, X₁₇ is A, I or Q, X₂₀ is Aib, αMe-4-pal, Q or R, and X₂₄ is E, Q, D-Glu or N. In an embodiment, the conjugation is to the epsilon-amino group of the K side-chain.

[0371] In some embodiments, none of X₁₇, X₂₀, X₂₄ and X₂₈ is conjugated to a fatty acid.

[0372] In one embodiment, provided herein is a polypeptide that includes the formula II (SEQ ID NO:5):

YX₂QGTFTSDX₁₀SX₁₂X₁₃LDX₁₆X₁₇AQX₂₀X₂₁FIX₂₄X₂₅LX₂₇
X₂₈X₂₉X₃₀X₃₁SSX₃₄X₃₅X₃₆X₃₇X₃₈X₃₉X₄₀X₄₁X₄₂,

wherein:
[0373] X₂ is Aib,
[0374] X₁₀ is F, 4-Pal, F(4CN),
[0375] X₁₂ is Om, K, R, Q, Dap or Dab,
[0376] X₁₃ is αMeL,
[0377] X₁₆ is K or Orn,
[0378] X₁₇ is any amino acid with a functional group available for conjugation to a fatty acid,
[0379] X₂₀ is Aib, αMe-4-pal or Q,
[0380] X₂₁ is A, Q or Orn,
[0381] X₂₄ is E or Q,
[0382] X₂₅ is W, Y, 4-Pal, αMeY or αMe-4-Pal,
[0383] X₂₇ is L or I,
[0384] X₂₈ is E or A,
[0385] X₂₉ is G, D-Ala or Aib,
[0386] X₃₀ is A or G,
[0387] X₃₁ is P, H, S, 4-Pal, E, T, K(Ac) or Hyp,
[0388] X₃₄ is G or Aib,
[0389] X₃₅ is A, Aib, E, H or 4-Pal,
[0390] X₃₆ is P or Hyp,
[0391] X₃₇ is P or Hyp,
[0392] X₃₈ is P or Hyp,
[0393] X₃₉ is E, S, G, T, H, 4-Pal or γE,
[0394] X₄₀ is absent or G, E or S,
[0395] wherein if X₄₀ is G, E or S, then X₄₁ is absent or E, S, T, 4-Pal, D, G, Q or H,
[0396] wherein if X₄₁ is E, S, T, 4-Pal, D, G, Q or H, then X₄₂ is absent or G, E or γE,
[0397] wherein if X₄₀ is absent, then X₄₁ and X₄₂ are also absent,
[0398] wherein if X₄₁ is absent, then X₄₂ is also absent,
[0399] wherein the C-terminal amino acid is optionally amidated;
[0400] or a pharmaceutically acceptable salt thereof.

[0401] As noted before, if X₄₀ absent, then X₄₁ and X₄₂ are also absent and the polypeptide comprises a 39 amino acid sequence. If X₄₁ absent, then X₄₂ is also absent and the polypeptide comprises a 40 amino acid sequence. If X₄₂ is absent, then the polypeptide comprises a 41 amino acid sequence. If none of X₄₀, X₄₁ and X₄₂ are absent (in other words all of X₄₀, X₄₁ and X₄₂ are present), the polypeptide comprises a 42 amino acid sequence.

[0402] In one embodiment, X₄₀ is G, E or S, X₄₁ is absent, and X₄₂ is absent. In such embodiments, the polypeptide comprises a 40 amino acid sequence. In one embodiment, X₄₀ is G, E or S, X₄₁ is E, S, T, 4-Pal, D, G, Q or H, and X₄₂ is absent. In such embodiments, the polypeptide comprises a 41 amino acid sequence. In one embodiment, X₄₀ is G, E or S, X₄₁ is E, S, T, 4-Pal, D, G, Q or H, and X₄₂ is G, E or γE. In such embodiments, the polypeptide comprises a 42 amino acid sequence.

[0403] In some embodiments of polypeptides of formula II, the amino acid at position X₁₇ with a functional group available for conjugation to a fatty acid is K, C, E or D. In preferred embodiments, the amino acid at position X₁₇ with a functional group available for conjugation to a fatty acid is K and the conjugation is to the epsilon-amino group of the K side-chain.

[0404] In some embodiments of polypeptides of formula II, X₁₀ is F or 4-Pal. In some embodiments, X₁₀ is F. In some embodiments, X₁₀ is 4-Pal. In some embodiments, X₁₂ is Orn, K, R or Q. In some embodiments, X₁₂ is Orn. In some embodiments, X₁₂ is K. In some embodiments, X₁₂ is R. In some embodiments, X₁₂ is Q. In some embodiments, X₁₀ is F or 4-Pal and X₁₂ is Orn, K, R or Q. In some embodiments, X₁₀ is F and X₁₂ is Q. In some embodiments, X₁₀ is F and X₁₂ is Orn. In some embodiments, X₁₀ is F and X₁₂ is K. In some embodiments, X₁₀ is F and X₁₂ is R. In some embodiments, X₁₀ is 4-Pal and X₁₂ is Q. In some embodiments, X₁₀ is 4-Pal and X₁₂ is Orn. In some embodiments, X₁₀ is 4-Pal and X₁₂ is K. In some embodiments, X₁₀ is 4-Pal and X₁₂ is R.

[0405] In further embodiments, X₁₀ is selected from F or 4-Pal. In some embodiments, X₁₂ is selected from Orn, K, R or Q. In some embodiments, X₁₆ is K. In some embodiments, X₁₇ is K. In some embodiments, X₂₀ is selected from Aib or αMe-4-pal. In some embodiments, X₂₄ is E. In some embodiments, X₂₈ is selected from E or A. In some embodiments, X₃₁ is selected from P, H, S, 4-Pal, T or E. In some embodiments, X₃₅ is selected from A, Aib or E. In some embodiments, X₃₆ is P. In some embodiments, X₃₇ is P. In some embodiments, X₃₈ is P. In some embodiments, X₃₉ is selected from E, S or G. In some embodiments, X₄₀ is selected from G, E or S. In some embodiments, X₄₁ is selected from E, S, T, 4-Pal or H.

[0406] In some embodiments, X₁₀ is selected from the group consisting of F and 4-Pal. In some embodiments, X₁₂ is selected from the group consisting of Orn, K, R and Q. In some embodiments, X₁₆ is K. In some embodiments, X₁₇ is K. In some embodiments, X₂₀ is selected from the group consisting of Aib and αMe-4-pal. In some embodiments, X₂₄ is E. In some embodiments, X₂₈ is selected from the group consisting of E and A. In some embodiments, X₃₁ is selected from the group consisting of P, H, S, 4-Pal, T and E. In some embodiments, X₃₅ is selected from the group consisting of A, Aib and E. In some embodiments, X₃₆ is P. In some embodiments, X₃₇ is P. In some embodiments, X₃₈ is P. In some embodiments, X₃₉ is selected from the group consisting of E, S and G. In some embodiments, X₄₀ is selected from the group consisting of G, E and S. In some embodiments, X₄₁ is selected from the group consisting of E, S, T, 4-Pal and H.

[0407] In some embodiments, X₁₀ is selected from F or 4-Pal; X₁₂ is Orn, K, R or Q; X₁₆ is K; X₁₇ is K; X₂₀ is selected from Aib or αMe-4-pal; X₂₄ is E; X₂₈ is selected from E or A; X₃₁ is selected from P, H, S, 4-Pal, T or E; X₃₅ is selected from A, Aib or E; X₃₆ is P; X₃₇ is P; X₃₈ is P; X₃₉ is selected from E, S or G; X₄₀ is selected from G, E or S; and X₄₁ is selected from E, S, T, 4-Pal or H.

[0408] In some embodiments, X₁₀ is selected from the group consisting of F and 4-Pal; X₁₂ is selected from the group consisting of Orn, K, R and Q; X₁₆ is K; X₁₇ is K; X₂₀ is selected from the group consisting of Aib and αMe-4-pal; X₂₄ is E; X₂₈ is selected from the group consisting of E and A; X₃₁ is selected from the group consisting of P, H, S, 4-Pal, T and E; X₃₅ is selected from the group consisting of A, Aib and E; X₃₆ is P; X₃₇ is P; X₃₈ is P; X₃₉ is selected from the group consisting of E, S and G; X₄₀ is selected from the group consisting of G, E and S; and X₄₁ is selected from the group consisting of E, S, T, 4-Pal and H.

[0409] In some embodiments, amino acid X₁₇ is conjugated to a fatty acid. In some embodiments, amino acid X₁₇ is conjugated to a fatty acid optionally via a linker between the amino acid and the fatty acid. Thus, in some embodiments, amino acid X₁₇ is conjugated to a fatty acid via a direct bond between the amino acid and the fatty acid or via a linker between the amino acid and the fatty acid. In some embodiments, the fatty acid is a C₁₆-C₂₂ fatty acid.

[0410] Thus, in some embodiments, X₁₇ is K and is conjugated to a C₁₆-C₂₂ fatty acid via a direct bond between the amino acid and the C₁₆-C₂₂ fatty acid or via a linker between the amino acid and the C₁₆-C₂₂ fatty acid. In one embodiment, X₁₇ K is conjugated to a C₁₆-C₂₂ fatty acid via a linker between the amino acid and the C₁₆-C₂₂ fatty acid. In an embodiment, the conjugation is to the epsilon-amino group of the X₁₇ K side-chain.

[0411] In one embodiment, provided herein is a polypeptide that includes the formula II′ (SEQ ID NO:1244):

X₁X₂QGTFTSDX₁₀SX₁₂X₁₃LDX₁₆X₁₇AQX₂₀X₂₁FIX₂₄X₂₅LX₂₇
X₂₈X₂₉X₃₀X₃₁SSX₃₄X₃₅X₃₆X₃₇X₃₈X₃₉X₄₀X₄₁X₄₂X₄₃X₄₄,

wherein
[0412] X₁ is Y or NMeY
[0413] X₂ is Aib,
[0414] X₁₀ is F, 4-Pal or F(4CN),
[0415] X₁₂ is Orn, K, R, I, Q, Dap or Dab,
[0416] X₁₃ is αMeL,
[0417] X₁₆ is K or Orn,
[0418] X₁₇ is any amino acid with a functional group available for conjugation to a fatty acid,
[0419] X₂₀ is Aib, αMe-4-Pal, Q or L-Iva,
[0420] X₂₁ is A, Q or Orn,
[0421] X₂₄ is E or Q,
[0422] X₂₅ is W, Y, 4-Pal, αMeY or αMe-4-Pal,
[0423] X₂₇ is L or I,
[0424] X₂₈ is E, Q or A,
[0425] X₂ is G, D-Ala or Aib,
[0426] X₃₀ is A, S or G,
[0427] X₃₁ is P, H, S, 4-Pal, E, T, K(Ac) or Hyp,
[0428] X₃₄ is G or Aib,
[0429] X₃₅ is A, Aib, E, H or 4-Pal,
[0430] X₃₆ is P or Hyp,
[0431] X₃₇ is P or Hyp,
[0432] X₃₈ is P or Hyp,
[0433] X₃₉ is E, S, G, T, H, 4-Pal or γE,
[0434] X₄₀ is absent or G, E, S or D-Glu,
[0435] wherein if X₄₀ is G, E, S or D-Glu, then X₄₁ is absent or E, S, T, 4-Pal, D, G, Q or H,
[0436] wherein if X₄₁ is E, S, T, 4-Pal, D, G, Q or H, then X₄₂ is absent or G, E or γE,
[0437] wherein if X₄₂ is G, E, or γE, then X₄₃ is absent or E,
[0438] wherein if X₄₃ is E, then X₄₄ is absent or E,
[0439] wherein if X₄₀ is absent, then X₄₁, X₄₂, X₄₃, and X₄₄ are also absent,
[0440] wherein if X₄₁ is absent, then X₄₂, X₄₃ and X₄₄ are is also absent,
[0441] wherein if X₄₃ is absent then X₄₄ is also absent,
[0442] wherein the C-terminal amino acid is optionally amidated; or a pharmaceutically acceptable salt thereof.

[0443] As noted before, if X₄₀ absent, then X₄₁ through X₄₄ are also absent and the polypeptide comprises a 39 amino acid sequence backbone. If X₄₁ absent, then X₄₂ through X₄₄ are also absent and the polypeptide comprises a 40 amino acid sequence backbone. If X₄₂ is absent, then X₄₃ through X₄₄ are also absent and the polypeptide comprises a 41 amino acid sequence backbone. If X₄₃ is absent, then X₄₄ is also absent and the polypeptide comprises a 42 amino acid sequence backbone. If none of X₄₀ through X₄₄ are absent (in other words all of X₄₀ through X₄₄ are present), the polypeptide comprises a 44 amino acid sequence backbone.

[0444] In one embodiment, X₄₀ is G, E or S, X₄₁ is absent, and X₄₂ is absent. In such embodiments, the polypeptide comprises a 40 amino acid sequence. In one embodiment, X₄₀ is G, E or S, X₄₁ is E, S, T, 4-Pal, D, G, Q or H, and X₄₂ is absent. In such embodiments, the polypeptide comprises a 41 amino acid sequence. In one embodiment, X₄₀ is G, E or S, X₄₁ is E, S, T, 4-Pal, D, G, Q or H, and X₄₂ is G, E or γE. In such embodiments, the polypeptide comprises a 42 amino acid sequence backbone.

[0445] In some embodiments of polypeptides of formula II′, the amino acid at position X₁₇ with a functional group available for conjugation to a fatty acid is K, C, E or D. In some embodiments, the amino acid at position X₁₇ with a functional group available for conjugation to a fatty acid is K and the conjugation is to the epsilon-amino group of the K side-chain.

[0446] In some embodiments of polypeptides of formula II′, X₁₀ is F or 4-Pal. In some embodiments, X₁₀ is F. In some embodiments, X₁₀ is 4-Pal. In some embodiments, X₁₂ is Orn, K, R or Q. In some embodiments, X₁₂ is Orn. In some embodiments, X₁₂ is K. In some embodiments, X₁₂ is R. In some embodiments, X₁₂ is Q. In some embodiments, X₁₀ is F or 4-Pal and X₁₂ is Orn, K, R or Q. In some embodiments, X₁₀ is F and X₁₂ is Q. In some embodiments, X₁₀ is F and X₁₂ is Orn. In some embodiments, X₁₀ is F and X₁₂ is K. In some embodiments, X₁₀ is F and X₁₂ is R. In some embodiments, X₁₀ is 4-Pal and X₁₂ is Q. In some embodiments, X₁₀ is 4-Pal and X₁₂ is Orn. In some embodiments, X₁₀ is 4-Pal and X₁₂ is K. In some embodiments, X₁₀ is 4-Pal and X₁₂ is R.

[0447] In further embodiments, X₁₀ is selected from F or 4-Pal. In some embodiments, X₁₂ is selected from Orn, K. R or Q. In some embodiments, X₁₆ is K. In some embodiments, X₁₇ is K. In some embodiments, X₂₀ is selected from Aib or αMe-4-pal. In some embodiments, X₂₄ is E. In some embodiments, X₂₈ is selected from E or A. In some embodiments, X₃₁ is selected from P, H, S, 4-Pal, T or E. In some embodiments, X₃₅ is selected from A, Aib or E. In some embodiments, X₃₆ is P. In some embodiments, X₃₇ is P. In some embodiments, X₃₈ is P. In some embodiments, X₃₉ is selected from E, S or G. In some embodiments, X₄₀ is selected from G, E or S. In some embodiments, X₄₁ is selected from E, S, T, 4-Pal or H.

[0448] In some embodiments, X₁₀ is selected from the group consisting of F and 4-Pal. In some embodiments, X₁₂ is selected from the group consisting of Orn, K, R and Q. In some embodiments, X₁₆ is K. In some embodiments, X₁₇ is K. In some embodiments, X₂₀ is selected from the group consisting of Aib and αMe-4-pal. In some embodiments, X₂₄ is E. In some embodiments, X₂₈ is selected from the group consisting of E and A. In some embodiments, X₃₁ is selected from the group consisting of P, H, S, 4-Pal, T and E. In some embodiments, X₃₅ is selected from the group consisting of A, Aib and E. In some embodiments, X₃₆ is P. In some embodiments, X₃₇ is P. In some embodiments, X₃₈ is P. In some embodiments, X₃₉ is selected from the group consisting of E, S and G. In some embodiments, X₄₀ is selected from the group consisting of G, E and S. In some embodiments, X₄₁ is selected from the group consisting of E, S, T, 4-Pal and H.

[0449] In some embodiments, X₁₀ is selected from F or 4-Pal; X₁₂ is Orn, K, R or Q; X₁₆ is K; X₁₇ is K; X₂₀ is selected from Aib or αMe-4-pal; X₂₄ is E; X₂₈ is selected from E or A; X₃₁ is selected from P, H, S, 4-Pal, T or E; X₃₅ is selected from A, Aib or E; X₃₆ is P; X₃₇ is P; X₃₈ is P; X₃₉ is selected from E, S or G; X₄₀ is selected from G, E or S; and X₄₁ is selected from E, S, T, 4-Pal or H.

[0450] In some embodiments, X₁₀ is selected from the group consisting of F and 4-Pal; X₁₂ is selected from the group consisting of Orn, K, R and Q; X₁₆ is K; X₁₇ is K; X₂₀ is selected from the group consisting of Aib and αMe-4-pal; X₂₄ is E; X₂₈ is selected from the group consisting of E and A; X₃₁ is selected from the group consisting of P, H, S, 4-Pal, T and E; X₃₅ is selected from the group consisting of A, Aib and E; X₃₆ is P; X₃₇ is P; X₃₈ is P; X₃₉ is selected from the group consisting of E, S and G; X₄₀ is selected from the group consisting of G, E and S; and X₄₁ is selected from the group consisting of E, S, T, 4-Pal and H.

[0451] In some embodiments, amino acid X₁₇ is conjugated to a fatty acid. In some embodiments, amino acid X₁₇ is conjugated to a fatty acid optionally via a linker between the amino acid and the fatty acid. Thus, in some embodiments, amino acid X₁₇ is conjugated to a fatty acid via a direct bond between the amino acid and the fatty acid or via a linker between the amino acid and the fatty acid. In some embodiments, the fatty acid is a C₁₆-C₂₂ fatty acid.

[0452] Thus, in some embodiments, X₁₇ is K and is conjugated to a C₁₆-C₂₂ fatty acid via a direct bond between the amino acid and the C₁₆-C₂₂ fatty acid or via a linker between the amino acid and the C₁₆-C₂₂ fatty acid. In one embodiment, X₁₇ K is conjugated to a C₁₆-C₂₂ fatty acid via a linker between the amino acid and the C₁₆-C₂₂ fatty acid. In an embodiment, the conjugation is to the epsilon-amino group of the X₁₇ K side-chain.

[0453] In one embodiment, provided herein is a polypeptide that includes the formula III (SEQ ID NO:6):

YX₂QGTFTSDX₁₀SX₁₂X₁₃LDX₁₆X₁₇AQX₂₀X₂₁FIX₂₄X₂₅LX₂₇
X₂₈X₂₉X₃₀X₃₁SSX₃₄X₃₅X₃₆X₃₇X₃₈X₃₉X₄₀X₄₁,

wherein
[0454] X₁ is Y, NMeY or H,
[0455] X₂ is Aib,
[0456] X₆ is F, αMeF or αMeF(2F),
[0457] X₁₀ is F, 3-Pal, 4-Pal, F(4CN), F(4NO₂) or Y,
[0458] X₁₁ is S or αMeS,
[0459] X₁₂ is Om, K, R, Q, Dap, S, E or I,
[0460] X₁₃ is αMeL, I or L,
[0461] X₁₆ is K, Orn, A or E,
[0462] X₁₇ is any amino acid with a functional group available for conjugation to a fatty acid, A, I or Q,
[0463] X₁₉ is A or Q,
[0464] X₂₀ is any amino acid with a functional group available for conjugation to a fatty acid Aib, Q, R or αMe-4-pal,
[0465] X₂₁ is A, Aad, Aib, S, N, Q, E, T or Om,
[0466] X₂₃ is I or V,
[0467] X₂₄ is any amino acid with a functional group available for conjugation to a fatty acid E, D-Glu, Q or N,
[0468] X₂₅ is W, Y, F, 4-Pal, αMeY or αMe-4-pal,
[0469] X₂₇ is L, I, E, V, A, Q or S,
[0470] X₂₈ is any amino acid with a functional group available for conjugation to a fatty acid, E or A,
[0471] X₂₉ is G, Aib, T, D-Ala or A,
[0472] X₃₁ is P or E,
[0473] X₃₄ is G or Aib,
[0474] X₃₅ is A or E,
[0475] X₃₆ is P,
[0476] X₃₇ is P or E,
[0477] X₃₈ is P,
[0478] X₃₉ is E, S, G or A,
[0479] X₄₀ is absent or G, E, S, A or T,
[0480] wherein if X₄₀ is G, E, S, A or T, then X₄₁ is absent or is E, S, D or G,
[0481] wherein if X₄₁ is E, S, D or G, then X₄₂ is absent or G, E or γE,
[0482] wherein if X₄₀ is absent, then X₄₁ and X₄₂ are also absent,
[0483] wherein if X₄₁ is absent, then X₄₂ is also absent, wherein if X₁₀ is F, 3-Pal, 4-Pal, F(4CN), F(4NO₂), then X₁₂ is I and
[0484] wherein at least one of X₁₇, X₂₀, X₂₄ or X₂₈ is any amino acid with a functional group available for conjugation to a C₁₆-C₂₂ fatty acid,
[0485] wherein the C-terminal amino acid is optionally amidated;
[0486] or a pharmaceutically acceptable salt thereof.

[0487] As noted before, if X₄₀ absent, then X₄₁ and X₄₂ are also absent and the polypeptide comprises a 39 amino acid sequence. If X₄₁ absent, then X₄₂ is also absent and the polypeptide comprises a 40 amino acid sequence. If X₄₂ is absent, then the polypeptide comprises a 41 amino acid sequence. If none of X₄₀, X₄₁ and X₄₂ are absent (in other words all of X₄₀, X₄₁ and X₄₂ are present), the polypeptide comprises a 42 amino acid sequence.

[0488] In one embodiment, X₄₀ is G, E, S, A, or T, and X₄₁ is absent. In such embodiment, the polypeptide comprises a 40 amino acid sequence. In one embodiment, X₄₀ is G, E, S, A or T, X₄₁ is E, S, D or G. In such embodiment, the polypeptide comprises a 41 amino acid sequence. In one embodiment, X₄₀ is G, E, S, A or T, X₄₁ is E, S, D or G, and X₄₂ is G, E or γE. In such embodiment, the polypeptide comprises a 42 amino acid sequence.

[0489] In some embodiments of polypeptides of formula III, the amino acid at position X₁₇, X₂₀, X₂₄ or X₂₈ with a functional group available for conjugation to a fatty acid is K, C, E or D. In some embodiments, the amino acid at position X₁₇, X₂₀, X₂₄ or X₂₈ with a functional group available for conjugation to a fatty acid is K and the conjugation is to the epsilon-amino group of the K side-chain.

[0490] In some embodiments, X₁₀ is F, 3-Pal, 4-Pal, F(4CN) or F(4NO₂) and X₁₂ is I. In some embodiments of the polypeptide of formula III, X₁₀ is Y and X₁₂ is Orn, K. R. Q. Dap, S, E or I.

[0491] In some embodiments, only one of X₁₇, X₂₀, X₂₄ and X₂₈ is an amino acid with a functional group available for conjugation to a C₁₆-C₂₂ fatty acid.

[0492] In some embodiments, only one of X₁₇, X₂₀, X₂₄ and X₂₈ is conjugated to a fatty acid optionally via a linker between the amino acid and the fatty acid. Thus, in some embodiments, only one of X₁₇, X₂₀, X₂₄ and X₂₈ is conjugated to a fatty acid via a direct bond between the amino acid and the fatty acid or via a linker between the amino acid and the fatty acid. In one embodiment, only one of X₁₇, X₂₀, X₂₄ and X₂₈ is conjugated to a fatty acid via a linker between the amino acid and the fatty acid. In some embodiments, the fatty acid is a C₁₆-C₂₂ fatty acid.

[0493] Thus, in one embodiment, X₁₇ is K and is conjugated to a C₁₆-C₂₂ fatty acid via a direct bond or via a linker between the amino acid and the C₁₆-C₂₂ fatty acid. In one embodiment, X₁₇ is K and is conjugated to a C₁₆-C₂₂ fatty acid via a linker between the amino acid and the C₁₆-C₂₂ fatty acid. In such embodiments, X₂₀ is Aib, αMe-4-pal, Q or R, X₂₄ is E, Q, D-Glu or N, and X₂₈ is E or A. In an embodiment, the conjugation is to the epsilon-amino group of the K side-chain.

[0494] In one embodiment, X₂₀ is K and is conjugated to a C₁₆-C₂₂ fatty acid via a direct bond or via a linker between the amino acid and the C₁₆-C₂₂ fatty acid. In one embodiment, X₂₀ is K and is conjugated to a C₁₆-C₂₂ fatty acid via linker between the amino acid and the C₁₆-C₂₂ fatty acid. In such embodiments, X₁₇ is A, I or Q, X₂₄ is E, Q, D-Glu or N, and X₂₈ is E or A. In an embodiment, the conjugation is to the epsilon-amino group of the K side-chain.

[0495] In one embodiment, X₂₄ is K and is conjugated to a C₁₆-C₂₂ fatty acid via a direct bond or via a linker between the amino acid and the C₁₆-C₂₂ fatty acid. In one embodiment, X₂₄ is K and is conjugated to a C₁₆-C₂₂ fatty acid via linker between the amino acid and the C₁₆-C₂₂ fatty acid. In such embodiments, X₁₇ is A, I or Q, X₂₀ is Aib, αMe-4-pal, Q or R, and X₂₈ is E or A. In an embodiment, the conjugation is to the epsilon-amino group of the K side-chain.

[0496] In one embodiment, X₂₈ is K and is conjugated to a C₁₆-C₂₂ fatty acid via a direct bond or via a linker between the amino acid and the C₁₆-C₂₂ fatty acid. In one embodiment, X₂₈ is K and is conjugated to a C₁₆-C₂₂ fatty acid via a linker between the amino acid and the C₁₆-C₂₂ fatty acid. In such embodiments, X₁₇ is A, I or Q, X₂₀ is Aib, αMe-4-pal, Q or R, and X₂₄ is E, Q, D-Glu or N. In an embodiment, the conjugation is to the epsilon-amino group of the K side-chain.

[0497] In one embodiment, provided herein is a polypeptide that includes the formula III′ (SEQ ID NO:1245):

X₁X₂QX₄TX₆TSDX₁₀X₁₁X₁₂X₁₃LX₁₅X₁₆X₁₇AX₁₉X₂₀X₂₁FX₂₃
X₂₄X₂₅LX₂₇X₂₈X₂₉GX₃₁X₃₂SX₃₄X₃₅PX₃₇PX₃₉X₄₀X₄₁X₄₂
X₄₃X₄₄X₄₅X₄₆;

[0498] wherein
[0499] X₁ is Y, NMeY or H,
[0500] X₂ is Aib,
[0501] X₄ is G or D-Ala,
[0502] X₆ is F, αMeF or αMeF(2F),
[0503] X₁₀ is F, 3-Pal, 4-Pal, F(4CN), F(4NO₂) or Y,
[0504] X₁₁ is S or αMeS,
[0505] X₁₂ is Om, K, R, Q, Dap, S, E or I,
[0506] X₁₃ is αMeL, I or L,
[0507] X₁₅ is D or E,
[0508] X₁₆ is K, Orn, A or E,
[0509] X₁₇ is any amino acid with a functional group available for conjugation to a fatty acid, A, I or Q or Orn,
[0510] X₁₉ is A or Q,
[0511] X₂₀ is any amino acid with a functional group available for conjugation to a fatty acid, Aib, Q, R or αMe-4-Pal,
[0512] X₂₁ is A, Aad, Aib, S, N, Q, E, T or Orn,
[0513] X₂₃ is I or V,
[0514] X₂₄ is any amino acid with a functional group available for conjugation to a fatty acid E, D-Glu, Q, N or D-Gln,
[0515] X₂₅ is W, Y, F, 4-Pal, αMeY or αMe-4-Pal,
[0516] X₂₇ is L, I, E, V, A, Aad, T, Q or S,
[0517] X₂₈ is any amino acid with a functional group available for conjugation to a fatty acid, E or A,
[0518] X₂₉ is G, Aib, T, D-Ala or A,
[0519] X₃₁ is P or E,
[0520] X₃₂ is S or P,
[0521] X₃₄ is G or Aib,
[0522] X₃₅ is A, D or E,
[0523] X₃₇ is P or E,
[0524] X₃₉ is E, S, G, A, T or Orn,
[0525] X₄₀ is absent or G, E, S, A or T,
[0526] wherein if X₄₀ is G, E, S, A, T or D-Glu, then X₄₁ is absent or is E, S, D, G, Q, T, A, γE or D-Glu,
[0527] wherein if X₄₁ is E, S, D, G, Q, T, A, γE or D-Glu, then X₄₂ is absent or G, E, D-Glu, or γE,
[0528] wherein if X₄₂ is G, E, D-Glu or γE, then X₄₃ is absent or E, γE, or D-Glu,
[0529] wherein if X₄₃ is E, γE, or D-Glu, then X₄ is absent or E,
[0530] wherein if X₄₄ is E then X₄₅ is absent or E, wherein if X₄₅ is E then X₄₆ is absent or E,
[0531] wherein if X₄₀ is absent, then X₄₁ through X₄₆ are also absent,
[0532] wherein if X₄₁ is absent, then X₄₂, through X₄₆ are also absent,
[0533] wherein if X₄₂ is absent, then X₄₃ through X₄₆ are also absent,
[0534] wherein if X₄₃ is absent, then X₄₄ through X₄₆ are also absent,
[0535] wherein if X₄₄ is absent, then X₄₅ and X₄₆ are also absent,
[0536] wherein if X₄₅ is absent then X₄₆ is also absent,
[0537] wherein the polypeptide comprises at least one of the following: X₆ is αMeF or αMeF(2F); X₁₀ is F, 3-Pal, 4-Pal, F(4CN) or F(4NO₂); X₁₁ is αMeS; X₁₃ is αMeL; X₂₄ is D-Glu; and/or X₂₅ is αMeY,
[0538] wherein if X₁₀ is F, 3-Pal, 4-Pal, F(4CN), or F(4NO₂), then X₁₂ is I,
[0539] and wherein at least one of X₁₇, X₂₀, X₂₄ or X₂₈ is an amino acid with a functional group available for conjugation to a fatty acid,
[0540] wherein the C-terminal amino acid is optionally amidated; or a pharmaceutically acceptable salt thereof.

[0541] As noted before, if X₄₀ absent, then X₄₁ through X₄₆ are also absent and the polypeptide comprises a 39 amino acid sequence backbone. If X₄₁ absent, then X₄₂ through X₄₆ are also absent and the polypeptide comprises a 40 amino acid sequence backbone. If X₄₂ is absent, then the polypeptide comprises a 41 amino acid sequence backbone. If X₄₃ is absent, then the polypeptide comprises a 42 amino acid sequence backbone. If X₄₄ is absent, then the polypeptide comprises a 43 amino acid sequence backbone. If X₄₅ is absent, then the polypeptide comprises a 44 amino acid sequence backbone. If X₄₆ is absent, then the polypeptide comprises a 45 amino acid sequence backbone. If none of X₄₀ through X₄₆ are absent (in other words all of X₄₀ through X₄₆ are present), the polypeptide comprises a 46 amino acid sequence backbone.

[0542] In one embodiment, X₄₀ is G, E, S, A, or T, and X₄₁ is absent. In such embodiment, the polypeptide comprises a 40 amino acid sequence. In one embodiment, X₄₀ is G, E, S, A or T, X₄₁ is E, S, D or G. In such embodiment, the polypeptide comprises a 41 amino acid sequence. In one embodiment, X₄₀ is G, E, S, A or T, X₄₁ is E, S, D or G, and X₄₂ is G, E or γE. In such embodiment, the polypeptide comprises a 42 amino acid sequence.

[0543] In some embodiments of polypeptides of formula III′, the amino acid at position X₁₇, X₂₀, X₂₄ or X₂₈ with a functional group available for conjugation to a fatty acid is K, C, E or D. In some embodiments, the amino acid at position X₁₇, X₂₀, X₂₄ or X₂₈ with a functional group available for conjugation to a fatty acid is K and the conjugation is to the epsilon-amino group of the K side-chain.

[0544] In some embodiments, X₁₀ is F, 3-Pal, 4-Pal, F(4CN) or F(4NO₂) and X₁₂ is I. In some embodiments of the polypeptide of formula III, X₁₀ is Y and X₁₂ is Orn, K, R, Q, Dap, S, E or I.

[0545] In some embodiments, the polypeptide comprises at least three of the following: X₁₀ is F, 3-Pal, 4-Pal, F(4CN) or F(4NO₂); X₁₁ is αMeS; X₁₃ is αMeL; X₁₆ is Orn; X₂₄ is D-Glu; and/or X₂₅ is αMeY.

[0546] In some embodiments, X₁₀ is F, 3-Pal, 4-Pal, F(4CN) or F(4NO₂).

[0547] In some embodiments, X₁ is Y, X₂ is Aib, X₄ is G, X₆ is αMeF(2F), X₁₀ is 4-Pal, X₁₂ is I, X₁₃ is αMeL, X₁₅ is D, X₁₆ is Orn, X₁₉ is Q, X₂₀ is αMe-4-Pal, X₂₁ is E or Om, X₂₃ is I, X₂₄ is D-Glu, X₂₅ is αMeY, X₂₇ is I or V, X₂₈ is E, X₂₉ is G, X₃₁ is P, X₃₄ is G, X₃₅ is A or E, X₃₇ is P, X₃₉ is E or S, X₄₀ is G or T, X₄₁ is E, S, or G, X₄₂ is absent, X₄₃ is absent, and X₄₄ is absent.

[0548] In some embodiments, X₁₁ is S, X₂₁ is Orn, X₂₇ is I, X₃₅ is E, X₃₉ is E, X₄₀ is T and X₄₁ is E.

[0549] In some embodiments, X₁₁ is αMeS, X₂₁ is E, X₂₇ is V, X₃₅ is A, X₃₉ is S, X₄₀ is G and X₄₁ is S.

[0550] In some embodiments, only one of X₁₇, X₂₀, X₂₄ and X₂₈ is an amino acid with a functional group available for conjugation to a C₁₆-C₂₂ fatty acid.

[0551] In some embodiments, only one of X₁₇, X₂₀, X₂₄ and X₂₈ is conjugated to a fatty acid optionally via a linker between the amino acid and the fatty acid. Thus, in some embodiments, only one of X₁₇, X₂₀, X₂₄ and X₂₈ is conjugated to a fatty acid via a direct bond between the amino acid and the fatty acid or via a linker between the amino acid and the fatty acid. In one embodiment, only one of X₁₇, X₂₀, X₂₄ and X₂₈ is conjugated to a fatty acid via a linker between the amino acid and the fatty acid. In some embodiments, the fatty acid is a C₁₆-C₂₂ fatty acid.

[0552] Thus, in one embodiment, X₁₇ is K and is conjugated to a C₁₆-C₂₂ fatty acid via a direct bond or via a linker between the amino acid and the C₁₆-C₂₂ fatty acid. In one embodiment, X₁₇ is K and is conjugated to a C₁₆-C₂₂ fatty acid via a linker between the amino acid and the C₁₆-C₂₂ fatty acid. In such embodiments, X₂₀ is Aib, αMe-4-pal, Q or R, X₂₄ is E, Q, D-Glu or N, and X₂₈ is E or A. In an embodiment, the conjugation is to the epsilon-amino group of the K side-chain.

[0553] In one embodiment, X₂₀ is K and is conjugated to a C₁₆-C₂₂ fatty acid via a direct bond or via a linker between the amino acid and the C₁₆-C₂₂ fatty acid. In one embodiment, X₂₀ is K and is conjugated to a C₁₆-C₂₂ fatty acid via linker between the amino acid and the C₁₆-C₂₂ fatty acid. In such embodiments, X₁₇ is A, I or Q, X₂₄ is E, Q, D-Glu or N, and X₂₈ is E or A. In an embodiment, the conjugation is to the epsilon-amino group of the K side-chain.

[0554] In one embodiment, X₂₄ is K and is conjugated to a C₁₆-C₂₂ fatty acid via a direct bond or via a linker between the amino acid and the C₁₆-C₂₂ fatty acid. In one embodiment, X₂₄ is K and is conjugated to a C₁₆-C₂₂ fatty acid via linker between the amino acid and the C₁₆-C₂₂ fatty acid. In such embodiments, X₁₇ is A, I or Q, X₂₀ is Aib, αMe-4-pal, Q or R, and X₂₈ is E or A. In an embodiment, the conjugation is to the epsilon-amino group of the K side-chain.

[0555] In one embodiment, X₂₈ is K and is conjugated to a C₁₆-C₂₂ fatty acid via a direct bond or via a linker between the amino acid and the C₁₆-C₂₂ fatty acid. In one embodiment, X₂₈ is K and is conjugated to a C₁₆-C₂₂ fatty acid via a linker between the amino acid and the C₁₆-C₂₂ fatty acid. In such embodiments, X₁₇ is A, I or Q, X₂₀ is Aib, αMe-4-pal, Q or R, and X₂₄ is E, Q, D-Glu or N. In an embodiment, the conjugation is to the epsilon-amino group of the K side-chain.

[0556] The amino acid sequences of polypeptides described herein incorporate naturally occurring amino acids, typically depicted herein using standard one letter codes (e.g., L=leucine), as well as alpha-methyl substituted residues of natural amino acids (e.g., α-methyl leucine (αMeL), and certain other non-natural amino acids, such as alpha amino isobutyric acid (Aib). The structures of these amino acids are depicted below:

[chemical structure]

[chemical structure]

[0557] As used herein “Or” means L-ornithine. As used herein “4-Pal” or “4Pal” means 3-(4-Pyridyl)-L-alanine or (S)-2-amino-3-(pyridin-4-yl)propanoic acid. As used herein “3-Pal” or “3Pal” means 3-(3-Pyridyl)-L-alanine or (S)-2-amino-3-(pyridin-3-yl)propanoic acid. As used herein “αMe-4-Pal” or “αMe4Pal” means alpha-methyl-3-(4-Pyridyl)-L-alanine. As used herein “αMeY” means alpha-methyl-L-tyrosine. As used herein “αMeL” means alpha-methyl-leucine. As used herein “D-Ala” and “a” each means D-alanine. As used herein “D-Glu” and “e” each means D-glutamic acid. As used herein “Aib” means 2-Aminoisobutyric Acid. As used herein, “NMeY” means N-methyl-tyrosine. As used herein “Dap” means (S)-2,3-diaminopropanoic acid. As used herein “Dab” means (S)-2,4-diaminobutanoic acid. As used herein “Hyp” means Hydroxy-L-proline. As used herein “K(Ac)” means Ne-acetyl-L-lysine. As used herein “γGlu” means gamma L-glutamic acid. As used herein “Aad” means (S)-2-aminohexanedioic acid. As used herein “F(4CN)” means 4-cyano-L-phenylalanine or (S)-2-amino-3-(4-cyanophenyl)propanoic acid. As used herein “F(4NO₂)” means 4-nitro-L-phenylalanine or (S)-2-amino-3-(4-nitrophenyl)propanoic acid. As used herein “αMeS” means alpha-methyl-L-serine. As used herein “αMeF” means alpha-methyl-L-phenylalanine. As used herein “αMeF(2F)” means alpha-methyl-2-fluoro-L-phenylalanine or (S)-2-amino-3-(2-fluorophenyl)-2-methylpropanoic acid. As used herein “L-Iva” and “Iva” mean L-isovaline. As used herein “D-Gln” and “q” each means D-glutamine.

[0558] As noted before, in some embodiments, the polypeptides described herein include a fatty acid moiety conjugated, for example, by way of a direct bond or a linker to a natural or non-natural amino acid with a functional group available for conjugation. Such a conjugation is sometimes referred to as acylation. In certain instances, the amino acid with a functional group available for conjugation can be K, C, E and D. In particular instances, the amino acid with a functional group available for conjugation is K, where the conjugation is to an epsilon-amino group of a K side-chain.

[0559] The acylation of the polypeptides described herein is at position X₁₇ or X₂₀ or X₂₄ or X₂₈ in SEQ ID NO:4 or 6, or at position X₁₇ in SEQ ID NO:5. The fatty acid, and in certain embodiments the linker and/or amino acid sequence backbone, may act as albumin binders, and provide a potential to generate long-acting compounds.

[0560] In some embodiments, the polypeptides described herein utilize a C₁₆-C₂₂ fatty acid chemically conjugated to the functional group of an amino acid either via a direct bond or via a linker. The length and composition of the fatty acid impacts half-life of the polypeptides, their potency in in vivo animal models, and their solubility and stability. Conjugation to a C₁₆-C₂₂ saturated fatty monoacid or diacid results in polypeptides that exhibit desirable half-life, desirable potency in in vivo animal models, and desirable solubility and stability characteristics.

[0561] Examples of saturated C₁₆-C₂₂ fatty acids for use herein include, but are not limited to, palmitic acid (hexadecanoic acid) (C₁₆ monoacid), hexadecanedioic acid (C₁₆ diacid), margaric acid (heptadecanoic acid)(C₁₇ monoacid), heptadecanedioic acid (C₁₇ diacid), stearic acid (C₁₈ monoacid), octadecanedioic acid (C₁₈ diacid), nonadecylic acid (nonadecanoic acid)(C₁₉ monoacid), nonadecanedioic acid (C₁₉ diacid), arachadic acid (eicosanoic acid)(C₂₀ monoacid), eicosanedioic acid (C₂₀ diacid), heneicosylic acid (heneicosanoic acid)(C₂₁ monoacid), heneicosanedioic acid (C₂₁ diacid), behenic acid (docosanoic acid)(C₂₂ monoacid), docosanedioic acid (C₂₂ diacid), including branched and substituted derivatives thereof.

[0562] In certain instances, the C₁₆-C₂₂ fatty acid can be a saturated C₁₈ monoacid, a saturated C₁₈ diacid, a saturated C₁₉ monoacid, a saturated C₁₉ diacid, a saturated C₂₀ monoacid, a saturated C₂₀ diacid, and branched and substituted derivatives thereof. In more particular instances, the C₁₆-C₂₂ fatty acid can be octadecanedioic (C₁₈ diacid) or eicosanedioic acid (C₂₀ diacid).

[0563] In certain instances, the linker can have one or more (2-[2-(2-amino-ethoxy)-ethoxy]-acetyl) moieties or EK, optionally in combination with one to four amino acids.

[0564] In instances in which the linker includes at least one amino acid, the amino acid can be one to five Glu or γGlu amino acid residues. In some instances, the linker can include one or two or three or four or five Glu or γGlu amino acid residues, including the D-forms thereof. For example, the linker can include either one or two or three or four γGlu amino acid residues. Alternatively, the linker can include one to five amino acid residues (such as, for example, Glu or γGlu amino acids) used in combination with one to five (2-[2-(2-amino-ethoxy)-ethoxy]-acetyl) (“AEEA”) or one to five &K moieties. Specifically, the linker can be combinations of one to five Glu or γGlu amino acids and one to five (2-[2-(2-amino-ethoxy)-ethoxy]-acetyl) moieties, or one to five Glu or γGlu amino acids and one to five &K moieties. In some instances, the linker can be combinations of one or two or three γGlu amino acids and one or two (2-[2-(2-amino-ethoxy)-ethoxy]-acetyl) or EK moieties.

[0565] For example, in some embodiments the polypeptides described herein have linker and fatty acid components having the structure of the following formula:

[0566] (γGlu)ₐ-(2-[2-(2-amino-ethoxy)-ethoxy]-acetyl)_{b}-(γGlu)_{c}-CO—(CH₂)ₚ—CO₂H, where a is 0, 1 or 2; bis 0, 1 or 2; c is 0, 1, 2 or 3; and p is an integer between 14 to 20.

[0567] In some preferred embodiments, a is 0 or 1; b is 0, 1 or 2; c is 1, 2 or 3; and p an integer between 14 to 20.

[0568] In some embodiments, a is 0, b is 1, c is 1 or 2 and p is 16 or 18.

[0569] For example, in some embodiments, a is 0, bis 1, c is 1 and p is 16, the structure of which is depicted below.

[chemical structure]

[0570] For example, in some embodiments, a is 0, bis 1, c is 1 and p is 18, the structure of which is depicted below.

[chemical structure]

[0571] In some embodiments, a is 0, b is 1, c is 2 and p is 16, the structure of which is depicted below.

[chemical structure]

[0572] In some embodiments, a is 0, b is 1, c is 2 and p is 18, the structure of which is depicted below.

[chemical structure]

[0573] In some embodiments, a is 0, b is 2, c is 1 and p is 16 or 18.

[0574] For example, in some embodiments, a is 0, b is 2, c is 1 and p is 16, the structure of which is depicted below.

[chemical structure]

[0575] In some embodiments, a is 0, b is 2, c is 1 and p is 18, the structure of which is depicted below.

[chemical structure]

[0576] In some embodiments, a is 0, b is 0, c is 2 and p is 16 or 18.

[0577] For example, in some embodiments, a is 0, b is 0, c is 2 and p is 16, the structure of which is depicted below.

[chemical structure]

[0578] In some embodiments, a is 0, b is 0, c is 2 and p is 18, the structure of which is depicted below.

[chemical structure]

[0579] In some embodiments, a is 0, b is 0, c is 3 and p is 16 or 18.

[0580] For example, in some embodiments, a is 0, b is 0, c is 3 and p is 16, the structure of which is depicted below.

[chemical structure]

[0581] In some embodiments, a is 0, b is 0, c is 3 and p is 18, the structure of which is depicted below.

[chemical structure]

[0582] In some embodiments, a is 1, b is 1, c is 1 and p is 16 or 18.

[0583] For example, in some embodiments, a is 1, bis 1, c is 1 and p is 16, the structure of which is depicted below.

[chemical structure]

[0584] For example, in some embodiments, a is 1, b is 1, c is 1 and p is 18, the structure of which is depicted below.

[chemical structure]

[0585] In some embodiments the polypeptides described herein have linker and fatty acid components having the structure of the following formula:

[0586] (γGlu)_{d}-(EK)ₑ-(γGlu)_{f}-CO—(CH₂)_{q}—CO₂H, where d is 0, 1 or 2; e is 0, 1 or 2; f is 0, 1, 2 or 3; and q is an integer between 14 to 20.

[0587] For example, in one embodiment, d is 0; e is 2; f is 1; and q an integer between 14 to 20. In some embodiments, d is 0; e is 2; f is 1; and q is 16 or 18.

[0588] For example, in some embodiments, d is 0; e is 2; f is 1; and q is 16, the structure of which is depicted below.

[chemical structure]

[0589] For example, in some embodiments, d is 0; e is 2; f is 1; and q is 18, the structure of which is depicted below.

[chemical structure]

[0590] As shown in the chemical structures of Examples 1-1229 below, the linker-fatty acid moieties described above can be linked to amino acid present at positions 17, 20, 24 or 28. In some embodiments, a linker-fatty acid moiety described above is linked or conjugated to amino acid present at position 17, for example to the epsilon (ε)-amino group of the lysine (K) side-chain present at position 17. In some embodiments, a linker-fatty acid moiety described above is linked or conjugated to amino acid present at position 20, for example to the epsilon (ε)-amino group of the lysine (K) side-chain present at position 20. In some embodiments, a linker-fatty acid moiety described above is linked or conjugated to amino acid present at position 24, for example to the epsilon (ε)-amino group of the lysine (K) side-chain present at position 24. In some embodiments, a linker-fatty acid moiety described above is linked or conjugated to amino acid present at position 28, for example to the epsilon (8)-amino group of the lysine (K) side-chain present at position 28.

[0591] In some embodiments, the polypeptides described herein comprise a sequence selected from any one of SEQ ID NO'S: 7 to 1242 (described below in examples 1-1236). In some embodiments, the polypeptides described herein consist of a sequence selected from any one of SEQ ID NO'S: 7 to 1242 (described below in examples 1-1236).

[0592] In some embodiments, the polypeptides described herein are amidated. In some embodiments, the polypeptides described herein have a modification of the C-terminal group, wherein the modification is NH₂ or absent. In some embodiments, the polypeptides described herein have an OH group at the C-terminal.

[0593] In addition to the sequences described herein, the polypeptides described herein may include one or more conservative amino acid substitutions, provided, however, that the polypeptides remain capable of binding to and activating GIP, GLP-1 and Glucagon receptors.

[0594] In certain embodiments of polypeptides of any of the formulas described herein, the polypeptide is an isotopic derivative of any one of the polypeptides described herein or a pharmaceutically acceptable salt thereof. It is understood that the isotopic derivative can be prepared using any of a variety of art-recognized techniques. For example, the isotopic derivatives can generally be prepared by carrying out the procedures disclosed in the examples described herein by substituting an isotopically labeled reagent for a non-isotopically labeled reagent. In an embodiment of a polypeptide of any of the formulas described herein, or a pharmaceutically acceptable salt thereof, the polypeptide is a deuterated derivative of any one of the polypeptides described herein.

[0595] In the polypeptides of this invention any atom not specifically designated as a particular isotope is meant to represent any stable isotope of that atom. Unless otherwise stated, when an atom is designated specifically as “H” or “hydrogen”, the atom is understood to have hydrogen at its natural abundance isotopic composition. Also, unless otherwise stated, when an atom is designated specifically as “D” or “deuterium”, the atom is understood to have deuterium at an abundance substantially greater than the natural abundance of deuterium, which is 0.015%.

[0596] The affinity of the polypeptides described herein for each of the GIP, GLP-1 and glucagon receptors may be measured using techniques known in the art for measuring receptor binding levels and is commonly expressed as an inhibitory constant (Ki) value. The activity of the polypeptides described herein at each of the receptors also may be measured using techniques known in the art, including, for example, the in vitro activity assays described below, and is commonly expressed as an effective concentration 50 (EC 50) value, which is the concentration of compound causing half-maximal simulation in a dose response curve.

[0597] The polypeptides described herein may react with any number of inorganic and organic acids/bases to form pharmaceutically acceptable acid/base addition salts. Pharmaceutically acceptable salts and common techniques for preparing them are well known in the art (see. e.g., Stahl et al., Handbook of Pharmaceutical Salts: Properties, Selection and Use, 2^{nd} Revised Edition (Wiley-VCH, 2011)). Pharmaceutically acceptable salts for use herein include sodium, potassium, trifluoroacetate, hydrochloride and/or acetate salts. Thus, in some embodiments, provided herein are pharmaceutically acceptable salt forms of the GGG polypeptides. In some embodiments, the pharmaceutically acceptable forms are selected from sodium or potassium salts. In some embodiments, the pharmaceutically acceptable forms are selected from the group consisting of sodium, potassium salts. In some preferred embodiments, a pharmaceutically acceptable salt is a sodium salt.

[0598] The polypeptides described herein are suitable for administration by a parenteral route (e.g., subcutaneous, intravenous, intraperitoneal, intramuscular or transdermal) or oral route (e.g., tablet, capsule). In some preferred embodiments, the polypeptides described herein are suitable for oral administration. The in vitro permeability (Papp) assay and in vivo ileum absorption assay described herein are useful tools for assessing the potential for oral delivery of a polypeptide.

[0599] In another embodiment, provided herein is a pharmaceutical composition comprising a polypeptide described herein, or a pharmaceutically acceptable salt thereof, and a pharmaceutically acceptable carrier, diluent, or excipient. Some pharmaceutical compositions and techniques for preparing the same are well known in the art. See, e.g., Remington: The Science and Practice of Pharmacy (Troy, Ed., 21^{st} Edition, Lippincott, Williams & Wilkins, 2006).

[0600] In some embodiments, the pharmaceutical composition is suitable for administration by a parenteral route (e.g., subcutaneous, intravenous, intraperitoneal, intramuscular or transdermal). In some embodiments, the pharmaceutical composition is suitable for oral administration (e.g., tablet, capsule). In some embodiments, the pharmaceutical composition is administered parenterally. In some embodiments, the pharmaceutical composition is administered orally.

[0601] Physiochemical properties of a polypeptide in addition to anatomical and physiological features of the gastrointestinal tract may pose challenges to efficient oral delivery of a peptide. In an embodiment a pharmaceutical composition for oral administration comprises a polypeptide described herein or a pharmaceutically acceptable salt thereof, and a permeation enhancer. In an embodiment, a pharmaceutical composition for oral administration comprises polypeptide described herein or a pharmaceutically acceptable salt thereof, a permeation enhancer, and a protease inhibitor.

[0602] As used herein the term “permeation enhancer” means permeation enhancer that enhances oral absorption of a polypeptide of this invention. As used herein, permeation enhancer means permeation enhancers, such as sodium decanoate (C10), sodium taurodeoxycholate (NaTDC), lauroyl carnitine (LC), dodecyl maltoside, dodecyl phosphatidylcholine, SNAC, a Rhamnolipid, and permeation enhancers reported in the literature, such as for example, Permeant inhibitor of phosphatase, PIP-250 and PIP-640. See. Pharmaceutics. 2019 January: 11(1): 41, (See Biomaterials. 2012; 33; 3464-3474), ZOT (zonula occludens toxin), ΔG (fragment of ZOT) (See Int. J. Pharm. 2009; 365, 121-130). In an embodiment, a permeation enhancer is selected from sodium decanoate, sodium taurodeoxycholate, and lauroyl carnitine. In an embodiment, a permeation enhancer is selected from the group consisting of C10, LC, or NaTDC. In an embodiment, a permeation enhancer is selected from the group consisting of sodium decanoate, sodium taurodeoxycholate, and lauroyl carnitine. In an embodiment, a permeation enhancer is selected from the group consisting of C10, LC, and NaTDC.

[0603] As used herein the term “protease inhibitor” means a protease inhibitor that may be selected from the group consisting of protein based, peptide based, and small molecule based. Protease inhibitors are well known and may include, for example, soy bean trypsin inhibitor (“SBTI”), soybean trypsin-chymotrypsin inhibitor (“SBTCI”), ecotin, sunflower trypsin inhibitor (“SFTI”), leupeptin, citric acid, ethylenediaminetetraacetic acid (“EDTA”), sodium glycocholate and 4-(2-aminoethyl) benzenesulfonyl fluoride hydrochloride (“AEBSF”). In an embodiment a protease inhibitor is selected from the group consisting of SBTI, SBTCI and SFTI. In an embodiment, a protease inhibitor is SBTI.

[0604] The disclosure also provides and therefore encompasses novel intermediates and methods of synthesizing the polypeptides described herein, or pharmaceutically acceptable salts thereof. The intermediates and polypeptides described herein can be prepared by a variety of techniques known in the art. For example, a method using chemical synthesis is illustrated in the Examples below or using biological expression. The specific synthetic steps for each of the routes described may be combined in different ways to prepare the polypeptides described herein. The reagents and starting materials are readily available to one of skill in the art.

[0605] With respect to chemical synthesis, one can use standard manual or automated solid-phase synthesis procedures. For example, automated peptide synthesizers are commercially available from, for example, CEM (Charlotte, North Carolina), CSBio (Menlo Park, California) and Gyros Protein Technologies Inc. (Tucson, AZ). Reagents for solid-phase synthesis are readily available from commercial sources. Solid-phase synthesizers can be used according to the manufacturer's instructions for blocking interfering groups, protecting amino acids during reaction, coupling, deprotecting and capping of unreacted amino acids.

[0606] With respect to biological expression, one can use standard recombinant techniques to construct a polynucleotide having a nucleic acid sequence that encodes an amino acid sequence for all or part of a polypeptide, incorporate that polynucleotide into recombinant expression vectors, and introduce the vectors into host cells, such as bacteria, yeast and mammalian cells, to produce the polypeptide. See, e.g., Green & Sambrook, “Molecular Cloning: A Laboratory Manual” (Cold Spring Harbor Laboratory Press, 4th ed. 2012). The polypeptides may readily be produced in mammalian cells such as CHO, NSO, 20 HEK293, BHK, or COS cells: in bacterial cells such as E. coli, Bacillus subtilis, or Pseudomonas fluorescens: in insect cells, or in fungal or yeast cells, which are cultured using techniques known in the art. The vectors containing the polynucleotide sequences of interest can be transferred into the host cell by well-known methods, which vary depending on the type of cellular host. Various methods of protein purification may be employed and such methods are known in the art.

[0607] The polypeptides described herein may be used for treating a variety of conditions, disorders, diseases or symptoms. In particular, methods are provided for treating obesity in an individual, where such methods include at least a step of administering to an individual in need of such treatment an effective amount of a polypeptide described herein, or a pharmaceutically acceptable salt thereof.

[0608] Additionally, methods are provided for chronic weight management in an individual, where such methods include at least a step of administering to an individual in need of such treatment an effective amount of a polypeptide described herein, or a pharmaceutically acceptable salt thereof.

[0609] Additionally, methods are provided for treating type 2 diabetes mellitus (T2DM) in an individual, where such methods include at least a step of administering to an individual in need of such treatment an effective amount of a polypeptide described herein, or a pharmaceutically acceptable salt thereof.

[0610] Additionally, methods are provided for treating non-alcoholic fatty liver disease (NAFLD) in an individual, where such methods include at least a step of administering to an individual in need of such treatment an effective amount of a polypeptide described herein, or a pharmaceutically acceptable salt thereof.

[0611] Additionally, methods are provided for treating non-alcoholic steatohepatitis (NASH) in an individual, where such methods include at least a step of administering to an individual in need of such treatment an effective amount of a polypeptide described herein, or a pharmaceutically acceptable salt thereof.

[0612] Additionally, methods are provided for treating dyslipidemia in an individual, where such methods include at least a step of administering to an individual in need of such treatment an effective amount of a polypeptide described herein, or a pharmaceutically acceptable salt thereof.

[0613] Additionally, methods are provided for treating metabolic syndrome in an individual, where such methods include at least a step of administering to an individual in need of such treatment an effective amount of a polypeptide described herein, or a pharmaceutically acceptable salt thereof.

[0614] Additionally, methods are provided for treating osteoarthritis (OA) in an individual, where such methods include at least a step of administering to an individual in need of such treatment an effective amount of a polypeptide described herein, or a pharmaceutically acceptable salt thereof.

[0615] Additionally, methods are provided for treating obesity-related sleep apnea (OSA) in an individual, where such methods include at least a step of administering to an individual in need of such treatment an effective amount of a polypeptide described herein, or a pharmaceutically acceptable salt thereof.

[0616] Additionally, methods are provided for treating polycystic ovary syndrome (PCOS) in an individual, where such methods include at least a step of administering to an individual in need of such treatment an effective amount of a polypeptide described herein, or a pharmaceutically acceptable salt thereof.

[0617] Additionally, methods are provided for inducing non-therapeutic weight loss in an individual, where such methods include at least a step of administering to an individual in need of such treatment an effective amount of a polypeptide described herein, or a pharmaceutically acceptable salt thereof.

[0618] In these methods, effectiveness of the polypeptides can be assessed by, for example, observing a significant reduction in blood glucose, observing a significant increase in insulin, observing a significant reduction in HbAlc and/or observing a significant reduction in body weight.

[0619] Alternatively, the polypeptides described herein or pharmaceutically acceptable salts thereof may be used for improving bone strength in an individual in need thereof. In some instances, the individual in need thereof has hypo-ostosis or hypo-osteoidosis, or is healing from bone fracture, orthotic procedure, prosthetics implant, dental implant, and/or spinal fusion. The polypeptides described herein also may be used for treating other disorders such as Parkinson's disease or Alzheimer's disease.

[0620] Additionally, provided is a polypeptide described herein, or a pharmaceutically acceptable salt thereof, for use in therapy. In some embodiments, provided herein is a polypeptide described herein or a pharmaceutically acceptable salt thereof, for use in treating obesity, chronic weight management, type 2 diabetes mellitus, non-alcoholic fatty liver disease (NAFLD), non-alcoholic steatohepatitis (NASH), dyslipidemia, metabolic syndrome, osteoarthritis (OA), obesity-related sleep apnea (OSA) and polycystic ovary syndrome (PCOS). Also provided is a use of a polypeptide described herein, or a pharmaceutically acceptable salt thereof, for inducing non-therapeutic weight loss.

[0621] Additionally, provided is a use of a polypeptide described herein, or a pharmaceutically acceptable salt thereof, in the manufacture of a medicament for treating obesity, chronic weight management, type 2 diabetes mellitus, non-alcoholic fatty liver disease (NAFLD), non-alcoholic steatohepatitis (NASH), dyslipidemia, metabolic syndrome, osteoarthritis (OA), obesity-related sleep apnea (OSA) and polycystic ovary syndrome (PCOS). Also provided is a use of a polypeptide described herein, or a pharmaceutically acceptable salt thereof, in the manufacture of a medicament for inducing non-therapeutic weight loss.

[0622] The polypeptides or pharmaceutical compositions described herein may be provided as part of a kit. In some instances, the kit includes a device for administering at least one polypeptide (and optionally at least one additional therapeutic agent) to an individual, such as a syringe, automatic injector or pump.

[0623] Additional non-limiting embodiments are set forth below:
[0624] 1. A polypeptide comprising:

X₁X₂QGTX₆TSDX₁₀X₁₁X₁₂X₁₃LDX₁₆X₁₇AX₁₉X₂₀X₂₁FX₂₃X₂₄
X₂₅LX₂₇X₂₈X₂₉X₃₀X₃₁SSX₃₄X₃₅X₃₆X₃₇X₃₈X₃₉X₄₀X₄₁X₄₂,

wherein:
   [0625] X₁ is Y, NMeY or H,
   [0626] X₂ is Aib,
   [0627] X₆ is F, αMeF or αMeF(2F),
   [0628] X₁₀ is F, 4-Pal, F(4CN), 3-Pal, F(4NO₂) or Y,
   [0629] X₁₁ is S or αMeS,
   [0630] X₁₂ is Orn, K, R, Q, Dap, Dab, S, E or I,
   [0631] X₁₃ is αMeL, I or L,
   [0632] X₁₆ is K, Orn, A or E,
   [0633] X₁₇ is any amino acid with a functional group available for conjugation to a fatty acid, A, I or Q,
   [0634] X₁₉ is Q or A,
   [0635] X₂₀ is any amino acid with a functional group available for conjugation to a fatty acid, Aib, αMe-4-Pal, Q or R,
   [0636] X₂₁ is A, Q, Orn, Aad, Aib, S, N, E or T,
   [0637] X₂₃ is I or V,
   [0638] X₂₄ is any amino acid with a functional group available for conjugation to a fatty acid, E, Q, D-Glu or N,
   [0639] X₂₅ is W, Y, F, 4-Pal, αMeY or αMe-4-Pal,
   [0640] X₂₇ is L, I, E, V, A, Q or S,
   [0641] X₂₈ is any amino acid with a functional group available for conjugation to a fatty acid, E or A,
   [0642] X₂₉ is G, D-Ala, Aib, T or A,
   [0643] X₃₀ is A or G,
   [0644] X₃₁ is P, H, S, 4-Pal, E, T, K(Ac) or Hyp,
   [0645] X₃₄ is G or Aib,
   [0646] X₃₅ is A, Aib, E, H or 4-Pal,
   [0647] X₃₆ is P or Hyp,
   [0648] X₃₇ is P, Hyp or E,
   [0649] X₃₈ is P or Hyp,
   [0650] X₃₉ is E, S, G, T, H, 4-Pal, γE or A,
   [0651] X₄₀ is absent or G, E, S, A or T,
   [0652] wherein if X₄₀ is G, E, S, A or T, then X₄₁ is absent or E, S, T, 4-Pal, D, G, Q or H,
   [0653] wherein if X₄₁ is E, S, T, 4-Pal, D, G, Q or H, then X₄₂ is absent or G, E or γE
   [0654] wherein if X₄₀ is absent, then X₄₁ and X₄₂ are also absent,
   [0655] wherein if X₄₁ is absent, then X₄₂ is also absent,
   [0656] wherein at least one of X₁₇, X₂₀, X₂₄ and X₂₈ is an amino acid with a functional group available for conjugation to a fatty acid,
   [0657] wherein the C-terminal amino acid is optionally amidated;
   [0658] or a pharmaceutically acceptable salt thereof.
[0659] 2. The polypeptide of embodiment 1, or a pharmaceutically acceptable salt thereof, wherein
   [0660] X₄₀ is G, E, S, A or T,
   [0661] X₄₁ is absent, and
   [0662] X₄₂ is absent.
[0663] 3. The polypeptide of embodiment 1, or a pharmaceutically acceptable salt thereof, wherein
   [0664] X₄₀ is G, E, S, A or T,
   [0665] X₄₁ is E, S, T, 4-Pal, D, G, Q or H, and
   [0666] X₄₂ is absent.
[0667] 4. The polypeptide of embodiment 1, wherein
   [0668] X₄₀ is G, E, S, A or T,
   [0669] X₄₁ is E, S, T, 4-Pal, D, G, Q or H, and
   [0670] X₄₂ is G, E or γE.
[0671] 5. The polypeptide of any one of embodiments 1 to 4, wherein the amino acid at position X₁₇, X₂₀, X₂₄ or X₂₈ with a functional group available for conjugation to a fatty acid is K, C, E or D.
[0672] 6. The polypeptide of embodiment 5, wherein the amino acid at position X₁₇, X₂₀, X₂₄ or X₂₈ with a functional group available for conjugation to a fatty acid is K.
[0673] 7. The polypeptide of any one of embodiments 1 to 6, or a pharmaceutically acceptable salt thereof, wherein X₁₀ is F or 4-Pal.
[0674] 8. The polypeptide of any one of embodiments 1 to 7, or a pharmaceutically acceptable salt thereof, wherein X₁₂ is Om, K, R or Q.
[0675] 9. The polypeptide of any one of embodiments 1 to 8, or a pharmaceutically acceptable salt thereof, wherein only one of X₁₇, X₂₀, X₂₄ and X₂₈ is an amino acid with a functional group available for conjugation to a fatty acid.
[0676] 10. The polypeptide of any one of embodiments 1 to 9, or a pharmaceutically acceptable salt thereof, wherein only one of X₁₇, X₂₀, X₂₄ and X₂₈ is conjugated to a fatty acid via a direct bond or via a linker between the amino acid and the fatty acid.
[0677] 11. The polypeptide of embodiment 10, or a pharmaceutically acceptable salt thereof, wherein only one of X₁₇, X₂₀, X₂₄ and X₂₈ is conjugated to a fatty acid via a linker between the amino acid and the fatty acid.
[0678] 12. The polypeptide of any one of embodiments 1 to 11, wherein the fatty acid is a C₁₆-C₂₂ fatty acid.
[0679] 13. The polypeptide of embodiment 12, or a pharmaceutically acceptable salt thereof, wherein
   [0680] X₁₇ is K and is conjugated to a C₁₆-C₂₂ fatty acid via a direct bond or via a linker between the amino acid and the C₁₆-C₂₂ fatty acid,
   [0681] X₂₀ is Aib, αMe-4-Pal, Q or R,
   [0682] X₂₄ is E, Q, D-Glu or N, and
   [0683] X₂₈ is E or A.
[0684] 14. The polypeptide of embodiment 12, or a pharmaceutically acceptable salt thereof, wherein
   [0685] X₁₇ is A, I or Q,
   [0686] X₂₀ is K and is conjugated to the C₁₆-C₂₂ fatty acid via a direct bond or via a linker between the amino acid and the C₁₆-C₂₂ fatty acid,
   [0687] X₂₄ is E, Q, D-Glu or N, and
   [0688] X₂₈ is E or A.
[0689] 15. The polypeptide of embodiment 12, or a pharmaceutically acceptable salt thereof, wherein
   [0690] X₁₇ is A, I or Q,
   [0691] X₂₀ is Aib, αMe-4-Pal, Q or R,
   [0692] X₂₄ is K and is conjugated to the C₁₆-C₂₂ fatty acid via a direct bond or via a linker between the amino acid and the C₁₆-C₂₂ fatty acid, and
   [0693] X₂₈ is E or A.
[0694] 16. The polypeptide of embodiment 12, or a pharmaceutically acceptable salt thereof, wherein
   [0695] X₁₇ is A, I or Q,
   [0696] X₂₀ is Aib, αMe-4-Pal, Q or R,
   [0697] X₂₄ is E, Q, D-Glu or N, and
   [0698] X₂₈ is K and is conjugated to the C₁₆-C₂₂ fatty acid via a direct bond or via a linker between the amino acid and the C₁₆-C₂₂ fatty acid.
[0699] 17. The polypeptide of embodiment 1 comprising:

YX₂QGTFTSDX₁₀SX₁₂X₁₃LDX₁₆X₁₇AQX₂₀X₂₁FIX₂₄X₂₅LX₂₇
X₂₈X₂₉X₃₀X₃₁SSX₃₄X₃₅X₃₆X₃₇X₃₈X₃₉X₄₀X₄₁X₄₂,

wherein
   [0700] X₂ is Aib,
   [0701] X₁₀ is F, 4-Pal or F(4CN),
   [0702] X₁₂ is Orn, K, R, Q, Dap or Dab,
   [0703] X₁₃ is αMeL,
   [0704] X₁₆ is K or Orn,
   [0705] X₁₇ is any amino acid with a functional group available for conjugation to a fatty acid,
   [0706] X₂₀ is Aib, αMe-4-Pal or Q,
   [0707] X₂₁ is A, Q or Orn,
   [0708] X₂₄ is E or Q,
   [0709] X₂₅ is W, Y, 4-Pal, αMeY or αMe-4-Pal,
   [0710] X₂₇ is L or I,
   [0711] X₂₈ is E or A,
   [0712] X₂₉ is G, D-Ala or Aib,
   [0713] X₃₀ is A or G,
   [0714] X₃₁ is P, H, S, 4-Pal, E, T, K(Ac) or Hyp,
   [0715] X₃₄ is G or Aib,
   [0716] X₃₅ is A, Aib, E, H or 4-Pal,
   [0717] X₃₆ is P or Hyp,
   [0718] X₃₇ is P or Hyp,
   [0719] X₃₈ is P or Hyp,
   [0720] X₃₉ is E, S, G, T, H, 4-Pal or γE,
   [0721] X₄₀ is absent or G, E or S,
   [0722] wherein if X₄₀ is G, E or S, then X₄₁ is absent or E, S, T, 4-Pal, D, G, Q or H,
   [0723] wherein if X₄₁ is E, S, T, 4-Pal, D, G, Q or H, then X₄₂ is absent or G, E or γE,
   [0724] wherein the C-terminal amino acid is optionally amidated;
   [0725] or a pharmaceutically acceptable salt thereof.
[0726] 18. The polypeptide of embodiment 17, or a pharmaceutically acceptable salt thereof, wherein
[0727] X₄₀ G, E or S,
[0728] X₄₁ is absent, and X₄₂ is absent.
[0729] 19. The polypeptide of embodiment 17, or a pharmaceutically acceptable salt thereof, wherein
   [0730] X₄₀ G, E or S,
   [0731] X₄₁ is E, S, T, 4-Pal, D, G, Q or H, and
   [0732] X₄₂ is absent.
[0733] 20. The polypeptide of embodiment 17, or a pharmaceutically acceptable salt thereof, wherein
   [0734] X₄₀ G, E or S,
   [0735] X₄₁ is E, S, T, 4-Pal, D, G, Q or H, and
   [0736] X₄₂ is G, E or γE.
[0737] 21. The polypeptide of any one of embodiments 17 to 20, wherein X₁₇ is K, C, E or D.
[0738] 22. The polypeptide of embodiment 21, wherein X₁₇ is K.
[0739] 23. The polypeptide of any one of embodiments 17 to 22, or a pharmaceutically acceptable salt thereof, wherein X₁₀ is F or 4-Pal.
[0740] 24. The polypeptide of any one of embodiments 17 to 23, or a pharmaceutically acceptable salt thereof, wherein X₁₂ is Om, K, R or Q.
[0741] 25. The polypeptide of any one of embodiments 17 to 24, or a pharmaceutically acceptable salt thereof, wherein X₁₇ is K and is conjugated to a fatty acid via a direct bond or via a linker between the amino acid and the fatty acid.
[0742] 26. The polypeptide of embodiment 25, or a pharmaceutically acceptable salt thereof, wherein X₁₇ is K and is conjugated to a fatty acid via a linker between the amino acid and the fatty acid.
[0743] 27. The polypeptide of any one of embodiments 17 to 26, wherein the fatty acid is a C₁₆-C₂₂ fatty acid.
[0744] 28. The polypeptide of embodiment 27, or a pharmaceutically acceptable salt thereof, wherein X₁₇ is K and is conjugated to a C₁₆-C₂₂ fatty acid via a direct bond or via a linker between the amino acid and the C₁₆-C₂₂ fatty acid.
[0745] 29. The polypeptide of embodiment 1 comprising:

X₁X₂QGTX₆TSDX₁₀X₁₁X₁₂X₁₃LDX₁₆X₁₇AX₁₉X₂₀X₂₁FX₂₃X₂₄
X₂₅LX₂₇X₂₈X₂₉GX₃₁SSX₃₄X₃₅X₃₆X₃₇X₃₈X₃₉X₄₀X₄₁,

[0746] wherein
   [0747] X₁ is Y, NMeY or H,
   [0748] X₂ is Aib,
   [0749] X₆ is F, αMeF or αMeF(2F),
   [0750] X₁₀ is F, 3-Pal, 4-Pal, F(4CN), F(4NO₂) or Y,
   [0751] X₁₁ is S or αMeS,
   [0752] X₁₂ is Orn, K, R, Q, Dap, S, E or I,
   [0753] X₁₃ is αMeL, I or L,
   [0754] X₁₆ is K, Om, A or E,
   [0755] X₁₇ is any amino acid with a functional group available for conjugation to a fatty acid, A, I or Q,
   [0756] X₁₉ is A or Q,
   [0757] X₂₀ is any amino acid with a functional group available for conjugation to a fatty acid Aib, Q, R or αMe-4-Pal,
   [0758] X₂₁ is A, Aad, Aib, S, N, Q, E, T or Orn,
   [0759] X₂₃ is I or V,
   [0760] X₂₄ is any amino acid with a functional group available for conjugation to a fatty acid, E, D-Glu, Q or N,
   [0761] X₂₅ is W, Y, F, 4-Pal, αMeY or αMe-4-Pal,
   [0762] X₂₇ is L, I, E, V, A, Q or S,
   [0763] X₂₈ is any amino acid with a functional group available for conjugation to a fatty acid, E or A,
   [0764] X₂₉ is G, Aib, T, D-Ala or A,
   [0765] X₃₁ is P or E,
   [0766] X₃₄ is G or Aib,
   [0767] X₃₅ is A or E,
   [0768] X₃₆ is P,
   [0769] X₃₇ is P or E,
   [0770] X₃₈ is P,
   [0771] X₃₉ is E, S, G or A,
   [0772] X₄₀ is absent or G, E, S, A or T,
   [0773] wherein if X₄₀ is G, E, S, A or T, then X₄₁ is absent or is E, S, D or G,
   [0774] wherein if X₄₁ is E, S, D or G, then X₄₂ is absent or G, E or γE,
   [0775] wherein if X₁₀ is F, 3-Pal, 4-Pal, F(4CN), F(4NO₂), then X₁₂ is I,
   [0776] wherein at least one of X₁₇, X₂₀, X₂₄ or X₂₈ is an amino acid with a functional group available for conjugation to a fatty acid,
   [0777] wherein the C-terminal amino acid is optionally amidated;
[0778] or a pharmaceutically acceptable salt thereof.
[0779] 30. The polypeptide of embodiment 29, or a pharmaceutically acceptable salt thereof, wherein:
   [0780] X₄₀ G, E, S, A or T,
   [0781] X₄₁ is absent and
   [0782] X₄₂ is absent.
[0783] 31. The polypeptide of embodiment 29, or a pharmaceutically acceptable salt thereof, wherein:
   [0784] X₄₀ G, E, S, A or T,
   [0785] X₄₁ is E, S, D or G and
   [0786] X₄₂ is absent.
[0787] 32. The polypeptide of embodiment 29, or a pharmaceutically acceptable salt thereof, wherein:
   [0788] X₄₀ G, E, S, A or T,
   [0789] X₄₁ is E, S, D or G and
   [0790] X₄₂ is G, E or γE.
[0791] 33. The polypeptide of any one of embodiments 29 to 32, wherein the amino acid at position X₁₇, X₂₀, X₂₄ or X₂₈ with a functional group available for conjugation to a fatty acid is K, C, E or D.
[0792] 34. The polypeptide of embodiment 5, wherein the amino acid at position X₁₇, X₂₀, X₂₄ or X₂₈ with a functional group available for conjugation to a fatty acid is K.
[0793] 35. The polypeptide of any one of embodiments 29 to 34, or a pharmaceutically acceptable salt thereof, wherein X₁₀ is F, 3-Pal, 4-Pal, F(4CN) or F(4NO₂) and X₁₂ is I.
[0794] 36. The polypeptide of any one of embodiments 29 to 34, or a pharmaceutically acceptable salt thereof, wherein X₁₀ is Y and X₁₂ is Om, K, R, Q, Dap, S, E or I.
[0795] 37. The polypeptide of any one of embodiments 29 to 36, or a pharmaceutically acceptable salt thereof, wherein only one of X₁₇, X₂₀, X₂₄ or X₂₈ is an amino acid with a functional group available for conjugation to a fatty acid.
[0796] 38. The polypeptide of any one of embodiments 29 to 37, or a pharmaceutically acceptable salt thereof, wherein only one of X₁₇, X₂₀, X₂₄ or X₂₈ is conjugated to a fatty acid via a direct bond or via a linker between the amino acid and the fatty acid.
[0797] 39. The polypeptide of embodiment 38, or a pharmaceutically acceptable salt thereof, wherein only one of X₁₇, X₂₀, X₂₄ or X₂₈ is conjugated to a fatty acid via a linker between the amino acid and the fatty acid.
[0798] 40. The polypeptide of any one of embodiments 29 to 39, wherein the fatty acid is a C₁₆-C₂₂ fatty acid.
[0799] 41. The polypeptide of embodiment 40, or a pharmaceutically acceptable salt thereof, wherein
   [0800] X₁₇ is K and is conjugated to a C₁₆-C₂₂ fatty acid via a direct bond or via a linker between the amino acid and the C₁₆-C₂₂ fatty acid,
   [0801] X₂₀ is Aib, αMe-4-Pal, Q or R,
   [0802] X₂₄ is E, Q, D-Glu or N, and
   [0803] X₂₈ is E or A.
[0804] 42. The polypeptide of embodiment 40, or a pharmaceutically acceptable salt thereof, wherein:
   [0805] X₁₇ is A, I or Q,
   [0806] X₂₀ is K and is conjugated to a C₁₆-C₂₂ fatty acid via a direct bond or via a linker between the amino acid and the C₁₆-C₂₂ fatty acid,
   [0807] X₂₄ is E, Q, D-Glu or N, and
   [0808] X₂₈ is E or A.
[0809] 43. The polypeptide of embodiment 40, or a pharmaceutically acceptable salt thereof, wherein:
   [0810] X₁₇ is A, I or Q,
   [0811] X₂₀ is Aib, αMe-4-Pal, Q or R,
   [0812] X₂₄ is K and is conjugated to a C₁₆-C₂₂ fatty acid via a direct bond or via a linker between the amino acid and the C₁₆-C₂₂ fatty acid, and
   [0813] X₂₈ is E or A.
[0814] 44. The polypeptide of embodiment 40, or a pharmaceutically acceptable salt thereof, wherein:
   [0815] X₁₇ is A, I or Q,
   [0816] X₂₀ is Aib, αMe-4-Pal, Q or R,
   [0817] X₂₄ is E, Q, D-Glu or N, and
   [0818] X₂₈ is K and is conjugated to a C₁₆-C₂₂ fatty acid via a direct bond or via a linker between the amino acid and the C₁₆-C₂₂ fatty acid.
[0819] 45. The polypeptide of any one of embodiments 10, 11, 12, 13, 14, 15, 16, 25, 26, 27, 28, 38, 39, 40, 41, 42, 43 and 44, or a pharmaceutically acceptable salt thereof, wherein the linker comprises one to four amino acids.
[0820] 46. The polypeptide of embodiment 45, or a pharmaceutically acceptable salt thereof, wherein the amino acids are Glu, γGlu or a combination thereof.
[0821] 47. The polypeptide of embodiment 45 or 46, or a pharmaceutically acceptable salt thereof, wherein the linker comprises one to four (2-[2-(2-amino-ethoxy)-ethoxy]-acetyl) or EK moieties.
[0822] 48. The polypeptide of embodiment 47, or a pharmaceutically acceptable salt thereof, wherein the linker comprises one to four (2-[2-(2-amino-ethoxy)-ethoxy]-acetyl) moieties.
[0823] 49. The polypeptide of embodiment 45, or a pharmaceutically acceptable salt thereof, wherein the linker comprises a structure of (γGlu)ₐ-(2-[2-(2-amino-ethoxy)-ethoxy]-acetyl)_{b}-(γGlu)_{c}-CO—(CH₂)ₚ—CO₂H, wherein a is 0 or 1, b is 0, 1 or 2, c is 1, 2 or 3, and p is an integer between 14 to 20.
[0824] 50. The polypeptide of embodiment 49, or a pharmaceutically acceptable salt thereof, wherein a is 0.
[0825] 51. The polypeptide of embodiment 49, or a pharmaceutically acceptable salt thereof, wherein a is 1.
[0826] 52. The polypeptide of any one of embodiments 49 to 51, or a pharmaceutically acceptable salt thereof, wherein b is 0.
[0827] 53. The polypeptide of any one of embodiments 49 to 51, or a pharmaceutically acceptable salt thereof, wherein b is 1.
[0828] 54. The polypeptide of any one of embodiments 49 to 51, or a pharmaceutically acceptable salt thereof, wherein b is 2.
[0829] 55. The polypeptide of any one of embodiments 49 to 54, or a pharmaceutically acceptable salt thereof, wherein c is 1.
[0830] 56. The polypeptide of any one of embodiments 49 to 54, or a pharmaceutically acceptable salt thereof, wherein c is 2.
[0831] 57. The polypeptide of any one of embodiments 49 to 54, or a pharmaceutically acceptable salt thereof, wherein c is 3.
[0832] 58. The polypeptide of any one of embodiments 49 to 57, or a pharmaceutically acceptable salt thereof, wherein p is 16.
[0833] 59. The polypeptide of any one of embodiments 49 to 57, or a pharmaceutically acceptable salt thereof, wherein p is 18.
[0834] 60. A polypeptide selected from the group consisting of SEQ ID NO's: 7 to 504, or a pharmaceutically acceptable salt thereof.
[0835] 61. The polypeptide of any one of embodiments 1 to 60, or a pharmaceutically acceptable salt thereof, wherein the C-terminal is amidated.
[0836] 62. The polypeptide of any one of embodiments 1 to 61, or a pharmaceutically acceptable salt thereof, wherein the pharmaceutically acceptable salt is selected from sodium, potassium, trifluoroacetate, hydrochloride or acetate.
[0837] 63. The polypeptide of embodiment 62, or a pharmaceutically acceptable salt thereof, wherein the pharmaceutically acceptable salt is selected from sodium and potassium.
[0838] 64. A pharmaceutical composition comprising the polypeptide or a pharmaceutically acceptable salt thereof, of any one of embodiments 1 to 63 and at least one pharmaceutically acceptable carrier, diluent, or excipient.
[0839] 65. The pharmaceutical composition of embodiment 64, wherein the composition is formulated for oral administration.
[0840] 66. The pharmaceutical composition of embodiment 64, wherein the composition is formulated for subcutaneous administration.
[0841] 67. A method of treating a disease or condition selected from the group consisting of diabetes mellitus, obesity, chronic weight management, non-alcoholic fatty liver disease (NAFLD), non-alcoholic steatohepatitis (NASH), dyslipidemia, metabolic syndrome, chronic kidney disease (CKD), osteoarthritis (OA), obesity-related sleep apnea (OSA) and polycystic ovary syndrome (PCOS), the method comprising a step of:
[0842] administering to an individual in need thereof an effective amount of a polypeptide, or a pharmaceutically acceptable salt thereof, of any one of embodiments 1 to 63.
[0843] 68. The polypeptide, or a pharmaceutically acceptable salt thereof, as described in by any one of Embodiments 1 to 63 for use in therapy.
[0844] 69. A polypeptide, or a pharmaceutically acceptable salt thereof, as described in any one of Embodiments 1 to 63 for use in treating a disease or condition selected from the group consisting of diabetes mellitus, obesity, chronic weight management, non-alcoholic fatty liver disease (NAFLD), non-alcoholic steatohepatitis (NASH), dyslipidemia, metabolic syndrome, chronic kidney disease (CKD), osteoarthritis (OA), obesity-related sleep apnea (OSA) and polycystic ovary syndrome (PCOS).
[0845] 70. Use of a polypeptide, or a pharmaceutically acceptable salt thereof, as described in any one of Embodiments 1 to 63 in the manufacture of a medicament for treating a disease or condition selected from the group consisting of diabetes mellitus, obesity, chronic weight management, non-alcoholic fatty liver disease (NAFLD), non-alcoholic steatohepatitis (NASH), dyslipidemia, metabolic syndrome, chronic kidney disease (CKD), osteoarthritis (OA), obesity-related sleep apnea (OSA) and polycystic ovary syndrome (PCOS).
[0846] 71. A polypeptide comprising a sequence having sequence identity of more than 60%, more than 70%, more than 80%, more than 90% or more than 95% to any of SEQ ID NO's. 7-1242.
[0847] 72. The polypeptide of embodiment 71, comprising a sequence selected from the group consisting of SEQ ID NO's. 7-1242.
[0848] 73. A polypeptide comprising a sequence having sequence identity of more than 60%, more than 70%, more than 80%, more than 90% or more than 95% to any of SEQ ID NOs. 294 to 775 or 1146 to 1240, or a pharmaceutically acceptable salt thereof.
[0849] 74. A polypeptide selected from the group consisting of SEQ ID NO's: 294 to 775 or 1146 to 1240, or a pharmaceutically acceptable salt thereof.
[0850] 75. The polypeptide of embodiment 74 selected from the group consisting of SEQ ID NO's: 692, 700, 702, 705, 706, 716, 718, 743, 747, 749, 767, or a pharmaceutically acceptable salt thereof.
[0851] 76. The polypeptide of any of the above embodiments, wherein the polypeptide has greater potency at each of the glucagon, GIP and GLP-1 receptors as compared to native glucagon (SEQ ID NO:3), GIP (SEQ ID NO:1) and GLP-17-36 (SEQ ID NO:2).
[0852] 77. The polypeptide of any of the above embodiments, wherein one or more hydrogen atoms are replaced by deuterium; or a pharmaceutically acceptable salt thereof.

[0853] The invention is further illustrated by the following examples, which are not to be construed as limiting.

### Peptide Synthesis

### Example 1

[0854] Example 1 is a compound represented by the following description:

(SEQ ID NO: 7)
Y-Aib-QGTFTSDFSK-αMeL-LDKK((2-[2-(2-Amino-ethoxy)-
ethoxy]-acetyl)-(γ-Glu)-CO—(CH₂₎₁₈—CO₂H)AQ-Aib-
AFIEYLLAGGPSSGEPPPSEG-NH₂.

[0855] Below is a depiction of the structure of Example 1 using the standard single letter amino acid codes with the exception of residues Aib2, αMeL13 and Aib20, where the structures of these amino acid residues have been expanded:

[chemical structure]

[0856] The peptide backbone of Example 1 is synthesized using Fluorenylmethyloxycarbonyl (Fmoc)/tert-Butyl (t-Bu) chemistry on a Symphony 12-Channel Multiplex Peptide Synthesizer (Protein Technologies, Inc. Tucson, AZ).

[0857] The resin consists of 1% DVB cross-linked polystyrene (Fmoc-Rink-MBHA Low Loading Resin, 100-200 mesh, EMD Millipore) at a substitution of 0.3-0.4 meq/g. Standard side-chain protecting groups are used. Fmoc-Lys(Mtt)-OH is used for the lysine at position 17, and Boc-Tyr(tBu)-OH is used for the tyrosine at position 1. Fmoc groups are removed prior to each coupling step (2×7 minutes) using 20% piperidine in DMF. All standard amino acid couplings are performed for 1 hour to a primary amine and 3 hour to a secondary amine, using an equal molar ratio of Fmoc amino acid (0.3M), diisopropylcarbodiimide (0.9M) and Oxyma (0.9M), at a 9-fold molar excess over the theoretical peptide loading. Exceptions are couplings to Ca-methylated amino acids, which are coupled for 3 hours. After completion of the synthesis of the peptide backbone, the resin is thoroughly washed with DCM for 6 times to remove residual DMF. The Mtt protecting group on the lysine at position 17 is selectively removed from the peptide resin using two treatments of 30% hexafluoroisopropanol (Oakwood Chemicals) in DCM (2× 40-minute treatment).

[0858] Subsequent attachment of the fatty acid-linker moiety is accomplished by coupling of 2-[2-(2-Fmoc-amino-ethoxy)-ethoxy]-acetic acid (Fmoc-AEEA-OH, ChemPep, Inc.), Fmoc-glutamic acid α-t-butyl ester (Fmoc-Glu-OtBu, Ark Pharm, Inc.), mono-OtBu-eicosanedioic acid (WuXi AppTec, Shanghai, China). 3-fold excess of reagents (AA:PyAOP:DIPEA=1:1:1 mol/mol) are used for each coupling that is 1-hour long.

[0859] After the synthesis is complete, the peptide resin is washed with DCM, and then thoroughly air-dried. The dry resin is treated with 10 ml of cleavage cocktail (trifluoroacetic acid:water:triisopropylsilane, 95:2.5:2.5 v/v) for 2 hours at room temperature. The resin is filtered off, washed twice each with 2 mL of neat TFA, and the combined filtrates are treated with 5-fold (by volume) cold diethyl ether (−20° C.) to precipitate the crude peptide. The peptide/ether suspension is then centrifuged at 3500 rpm for 2 min to form a solid pellet, the supernatant is decanted, and the solid pellet is triturated with ether two additional times and dried in vacuo. The crude peptide is solubilized in 20% acetonitrile/20% acetic acid/60% water and purified by RP-HPLC on a Luna 5 μm Phenyl-Hexyl Preparative Column (21×250 mm, Phenomenex) with linear gradients of 100% acetonitrile and 0.1% TFA/water buffer system (30-50% acetonitrile in 60 min). The purity of peptide is assessed using analytical RP-HPLC and pooling criteria is >95%. The main pool purity of Example 1 is found to be 98.8%. Subsequent lyophilization of the final main product pool yields the lyophilized peptide TFA salt. The molecular weight is determined by LC-MS (obsd: M+4H⁺/4=1226.8; Calc M+4H⁺/4=1226.9).

### Example 2 Through Example 1236

[0860] Polypeptides according to Example 2 (SEQ ID NO:8) through Example 1236 (SEQ ID NO:1242) are prepared substantially as described by the procedures of Example 1. These are listed below in Table 1. Additional depictions of certain examples are provided following Table 1.

TABLE 1

| | | SEQ | |
|---|---|---|---|
| Ex. | | ID | MW |
| No. | Sequence | NO | Calculated |
| 1 | Y-Aib-QGTFTSDFSK-αMeL-LDKK((2-[2-(2-Amino- | 7 | 4916.5 |
| | ethoxy)-ethoxy]-acetyl)-(γ-Glu)-CO—(CH₂)₁₈—CO₂H)AQ- | | |
| | Aib-AFIEYLLAGGPSSGEPPPSEG-NH₂ | | |
| 2 | Y-Aib-QGTFTSDFSK-αMeL-LDKK((2-[2-(2-Amino- | 8 | 4916.5 |
| | ethoxy)-ethoxy]-acetyl)-(γ-Glu)-CO—(CH₂)₁₈—CO₂H)AQ- | | |
| | Aib-AFIEYLLAGGPSSGEPPPSGE-NH₂ | | |
| 3 | Y-Aib-QGTFTSDFSK-αMeL-LDKK((2-[2-(2-Amino- | 9 | 4946.6 |
| | ethoxy)-ethoxy]-acetyl)-(γ-Glu)-CO—(CH₂)₁₈—CO₂H)AQ- | | |
| | Aib-AFIEYLLAGGPSSGEPPPSSE-NH₂ | | |
| 4 | Y-Aib-QGTFTSDFSK-αMeL-LDKK((2-[2-(2-Amino- | 10 | 4988.6 |
| | ethoxy)-ethoxy]-acetyl)-(γ-Glu)-CO—(CH₂)₁₈—CO₂H)AQ- | | |
| | Aib-AFIEYLLAGGPSSGEPPPSEE-NH₂ | | |
| 5 | Y-Aib-QGTFTSDFSK-αMeL-LDKK((2-[2-(2-Amino- | 11 | 5091.7 |
| | ethoxy)-ethoxy]-acetyl)₂-(γ-Glu)-CO—(CH₂)₁₈—CO₂H))AQ- | | |
| | Aib-AFIEYLLAGGPSSGEPPPSSE-NH₂ | | |
| 6 | Y-Aib-QGTFTSDFSK-αMeL-LDKK((2-[2-(2-Amino- | 12 | 4844.5 |
| | ethoxy)-ethoxy]-acetyl)-(γ-Glu)-CO—(CH₂)₁₈—CO₂H)AQ- | | |
| | Aib-AFIEYLLAGGPSSGEPPPSGG-NH₂ | | |
| 7 | Y-Aib-QGTFTSDFSK-αMeL-LDKK((2-[2-(2-Amino- | 13 | 4874.5 |
| | ethoxy)-ethoxy]-acetyl)-(γ-Glu)-CO—(CH₂)₁₈—CO₂H)AQ- | | |
| | Aib-AFIEYLLAGGPSSGEPPPSSG-NH₂ | | |
| 8 | Y-Aib-QGTFTSDFSK-αMeL-LDKK((2-[2-(2-Amino- | 14 | 4874.5 |
| | ethoxy)-ethoxy]-acetyl)-(γ-Glu)-CO—(CH₂)₁₈—CO₂H)AQ- | | |
| | Aib-AFIEYLLAGGPSSGEPPPSGS-NH₂ | | |
| 9 | Y-Aib-QGTFTSDFSK-αMeL-LDKK((2-[2-(2-Amino- | 15 | 4844.5 |
| | ethoxy)-ethoxy]-acetyl)-(γ-Glu)-CO—(CH₂)₁₈—CO₂H)AQ- | | |
| | Aib-AFIEYLLAGGPSSGEPPPGGS-NH₂ | | |
| 10 | Y-Aib-QGTFTSDFSK-αMeL-LDKK((2-[2-(2-Amino- | 16 | 4858.5 |
| | ethoxy)-ethoxy]-acetyl)-(γ-Glu)-CO—(CH₂)₁₈—CO₂H)AQ- | | |
| | Aib-AFIEYLLAGGPSSGAPPPSEG-NH₂ | | |
| 11 | Y-Aib-QGTFTSDFSK-αMeL-LDKK((2-[2-(2-Amino- | 17 | 4858.5 |
| | ethoxy)-ethoxy]-acetyl)-(γ-Glu)-CO—(CH₂)₁₈—CO₂H)AQ- | | |
| | Aib-AFIEYLLAGGPSSGAPPPSGE-NH₂ | | |
| 12 | Y-Aib-QGTFTSDFSK-αMeL-LDKK((2-[2-(2-Amino- | 18 | 4786.4 |
| | ethoxy)-ethoxy]-acetyl)-(γ-Glu)-CO—(CH₂)₁₈—CO₂H)AQ- | | |
| | Aib-AFIEYLLAGGPSSGAPPPSGG-NH₂ | | |
| 13 | Y-Aib-QGTFTSDFSK-αMeL-LDKK((2-[2-(2-Amino- | 19 | 4816.5 |
| | ethoxy)-ethoxy]-acetyl)-(γ-Glu)-CO—(CH₂)₁₈—CO₂H)AQ- | | |
| | Aib-AFIEYLLAGGPSSGAPPPSSG-NH₂ | | |
| 14 | Y-Aib-QGTFTSDFSK-αMeL-LDKK((2-[2-(2-Amino- | 20 | 4816.5 |
| | ethoxy)-ethoxy]-acetyl)-(γ-Glu)-CO—(CH₂)₁₈—CO₂H)AQ- | | |
| | Aib-AFIEYLLAGGPSSGAPPPSGS-NH₂ | | |
| 15 | Y-Aib-QGTFTSDFSK-αMeL-LDKK((2-[2-(2-Amino- | 21 | 4828.5 |
| | ethoxy)-ethoxy]-acetyl)-(γ-Glu)-CO—(CH₂)₁₈—CO₂H)AQ- | | |
| | Aib-AFIEYLLAGGPSSGAPPPGGE-NH₂ | | |
| 16 | Y-Aib-QGTFTSDFSK-αMeL-LDKK((2-[2-(2-Amino- | 22 | 4786.4 |
| | ethoxy)-ethoxy]-acetyl)-(γ-Glu)-CO—(CH₂)₁₈—CO₂H)AQ- | | |
| | Aib-AFIEYLLAGGPSSGAPPPGGS-NH₂ | | |
| 17 | Y-Aib-QGTFTSDFSK-αMeL-LDKK((2-[2-(2-Amino- | 23 | 5031.7 |
| | ethoxy)-ethoxy]-acetyl)₂-(γ-Glu)-CO—(CH₂)₁₈—CO₂H))AQ- | | |
| | Aib-AFIEYLLEGGPSSGAPPPGEG-NH₂ | | |
| 18 | Y-Aib-QGTFTSDFSK-αMeL-LDKK((2-[2-(2-Amino- | 24 | 4844.5 |
| | ethoxy)-ethoxy]-acetyl)-(γ-Glu)-CO—(CH₂)₁₈—CO₂H)AQ- | | |
| | Aib-AFIEYLLEGGPSSGAPPPGGS-NH₂ | | |
| 19 | Y-Aib-QGTFTSDFSK-αMeL-LDKK((2-[2-(2-Amino- | 25 | 4987.6 |
| | ethoxy)-ethoxy]-acetyl)-(γ-Glu)-CO—(CH₂)₁₈— | | |
| | CO₂H)AQQAFIEYLLA-Aib-GPSSGEPPPSEG-NH₂ | | |
| 20 | Y-Aib-QGTFTSDFSK-αMeL-LDKK((2-[2-(2-Amino- | 26 | 4939.6 |
| | ethoxy)-ethoxy]-acetyl)-(γ-Glu)-CO—(CH₂)₁₈—CO₂H)AQ- | | |
| | Aib-AFIEWLLAGGPSSGEPPPSEG-NH₂ | | |
| 21 | Y-Aib-QGTFTSDFSK-αMeL-LDKK((2-[2-(2-Amino- | 27 | 4939.6 |
| | ethoxy)-ethoxy]-acetyl)-(γ-Glu)-CO—(CH₂)₁₈—CO₂H)AQ- | | |
| | Aib-AFIEWLLAGGPSSGEPPPSGE-NH₂ | | |
| 22 | Y -- Aib-QGTFTSDFSK-αMeL-LDKK((2-[2-(2-Amino- | 28 | 4888.5 |
| | ethoxy)-ethoxy]-acetyl)-(γ-Glu)-CO—(CH₂)₁₆—CO₂H)AQ- | | |
| | Aib-AFIEYLLAGGPSSGEPPPSEG-NH₂ | | |
| 23 | Y-Aib-QGTFTSDFSK-αMeL-LDKK((2-[2-(2-Amino- | 29 | 4888.5 |
| | ethoxy)-ethoxy]-acetyl)-(γ-Glu)-CO—(CH₂)₁₆—CO₂H)AQ- | | |
| | Aib-AFIEYLLAGGPSSGEPPPSGE-NH₂ | | |
| 24 | Y-Aib-QGTFTSDFSK-αMeL-LDKK((2-[2-(2-Amino- | 30 | 4930.6 |
| | ethoxy)-ethoxy]-acetyl)-(γ-Glu)-CO—(CH₂)₁₈—CO₂H)AQ- | | |
| | Aib-AFIEYLLAGAPSSGAPPPSEG-NH₂ | | |
| 25 | Y-Aib-QGTFTSDFSK-αMeL-LDKK((2-[2-(2-Amino- | 31 | 5033.6 |
| | ethoxy)-ethoxy]-acetyl)₂-(γ-Glu)-CO—(CH₂)₁₆—CO₂H))AQ- | | |
| | Aib-AFIEYLLAGGPSSGEPPPSEG-NH₂ | | |
| 26 | Y-Aib-QGTFTSDFSK-αMeL-LDKK((2-[2-(2-Amino- | 32 | 4945.5 |
| | ethoxy)-ethoxy]-acetyl)-(γ-Glu)-CO—(CH₂)₁₆—CO₂H)AQ- | | |
| | Aib-QFIEYLLAGGPSSGEPPPSEG-NH₂ | | |
| 27 | Y-Aib-QGTFTSDFSK-αMeL-LDKK((2-[2-(2-Amino- | 33 | 4915.5 |
| | ethoxy)-ethoxy]-acetyl)-(γ-Glu)-CO—(CH₂)₁₈—CO₂H)AQ- | | |
| | Aib-AFIQYLLAGGPSSGEPPPSEG-NH₂ | | |
| 28 | Y-Aib-QGTFTSD-4Pal-SK-αMeL-LDKK((2-[2-(2-Amino- | 34 | 4917.5 |
| | ethoxy)-ethoxy]-acetyl)-(γ-Glu)-CO—(CH₂)₁₈—CO₂H)AQ- | | |
| | Aib-AFIEYLLAGGPSSGEPPPSGE-NH₂ | | |
| 29 | Y-Aib-QGTFTSDFS-Orn-αMeL-LDKK((2-[2-(2-Amino- | 35 | 4902.5 |
| | ethoxy)-ethoxy]-acetyl)-(γ-Glu)-CO—(CH₂)₁₈—CO₂H)AQ- | | |
| | Aib-AFIEYLLAGGPSSGEPPPSEG-NH₂ | | |
| 30 | Y-Aib-QGTFTSDFSK-αMeL-LDKK((2-[2-(2-Amino- | 36 | 4929.6 |
| | ethoxy)-ethoxy]-acetyl)-(γ-Glu)-CO—(CH₂)₁₈— | | |
| | CO₂H)AQQAFIEYLLA-Aib-GPSSGAPPPSEG-NH₂ | | |
| 31 | Y-Aib-QGTFTSDFSK-αMeL-LDKK((2-[2-(2-Amino- | 37 | 4886.5 |
| | ethoxy)-ethoxy]-acetyl)-(γ-Glu)-CO—(CH₂)₁₈—CO₂H)AQ- | | |
| | Aib-AFIEYLLAGGPSSGEPPPGEG-NH₂ | | |
| 32 | Y-Aib-QGTFTSDFSK-αMeL-LDKK((2-[2-(2-Amino- | 38 | 5061.7 |
| | ethoxy)-ethoxy]-acetyl)-(γ-Glu)-CO—(CH₂)₁₈—CO₂H)AQ- | | |
| | Aib-AFIEYLLAGGPSSGEPPPSEG-(2-[2-(2-Amino- | | |
| | ethoxy)-ethoxy]-acetic amide) | | |
| 33 | Y-Aib-QGTFTSDFSK-αMeL-LDKK((2-[2-(2-Amino- | 39 | 5061.7 |
| | ethoxy)-ethoxy]-acetyl)-(γ-Glu)-CO—(CH₂)₁₈—CO₂H)AQ- | | |
| | Aib-AFIEYLLAGGPSSGEPPPSGE-(2-[2-(2-Amino- | | |
| | ethoxy)-ethoxy]-acetic amide) | | |
| 34 | Y-Aib-QGTFTSDFSK-αMeL-LDKK((2-[2-(2-Amino- | 40 | 4900.5 |
| | ethoxy)-ethoxy]-acetyl)-(γ-Glu)-CO—(CH₂)₁₈—CO₂H)AQ- | | |
| | Aib-AFIEYLLEaGPSSGAPPPGEG-NH₂ | | |
| 35 | Y-Aib-QGTFTSDFSK-αMeL-LDKK((2-[2-(2-Amino- | 41 | 5016.6 |
| | ethoxy)-ethoxy]-acetyl)-(γ-Glu)-CO—(CH₂)₁₈—CO₂H)AQ- | | |
| | Aib-AFIEYLLEGGPSSGEPPPEEG-NH₂ | | |
| 36 | Y-Aib-QGTFTSDFSK-αMeL-LDKK((2-[2-(2-Amino- | 42 | 4988.6 |
| | ethoxy)-ethoxy]-acetyl)-(γ-Glu)-CO—(CH₂)₁₈—CO₂H)AQ- | | |
| | Aib-AFIEYLLEGGPSSGEPPPTEG-NH₂ | | |
| 37 | Y-Aib-QGTFTSDFSK-αMeL-LDKK((2-[2-(2-Amino- | 43 | 4939.6 |
| | ethoxy)-ethoxy]-acetyl)-(γ-Glu)-CO—(CH₂)₁₈—CO₂H)AQ- | | |
| | Aib-AFIEWLLEGGPSSGAPPPSEG-NH₂ | | |
| 38 | Y-Aib-QGTFTSDFSK-αMeL-LDKK((2-[2-(2-Amino- | 44 | 4996.6 |
| | ethoxy)-ethoxy]-acetyl)-(γ-Glu)-CO—(CH₂)₁₈—CO₂H)AQ- | | |
| | Aib-QFIEWLLEGGPSSGAPPPSEG-NH₂ | | |
| 39 | Y-Aib-QGTFTSDFSK-αMeL-LDKK((2-[2-(2-Amino- | 45 | 4938.6 |
| | ethoxy)-ethoxy]-acetyl)-(γ-Glu)-CO—(CH₂)₁₈—CO₂H)AQ- | | |
| | Aib-AFIQWLLEGGPSSGAPPPSEG-NH₂ | | |
| 40 | Y-Aib-QGTFTSDFSK-αMeL-LDKK((2-[2-(2-Amino- | 46 | 4939.6 |
| | ethoxy)-ethoxy]-acetyl)-(γ-Glu)-CO—(CH₂)₁₈—CO₂H)AQ- | | |
| | Aib-AFIEWLIEGGPSSGAPPPSEG-NH₂ | | |
| 41 | Y-Aib-QGTFTSDFSR-αMeL-LDKK((2-[2-(2-Amino- | 47 | 4872.5 |
| | ethoxy)-ethoxy]-acetyl)-(γ-Glu)-CO—(CH₂)₁₈—CO₂H)AQ- | | |
| | Aib-AFIEYLLEGGPSSGAPPPGGS-NH₂ | | |
| 42 | Y-Aib-QGTFTSDFSR-αMeL-LDKK((2-[2-(2-Amino- | 48 | 4900.5 |
| | ethoxy)-ethoxy]-acetyl)-(γ-Glu)-CO—(CH₂)₁₈—CO₂H)AQ- | | |
| | Aib-AFIEYLLE-Aib-GPSSGAPPPGGS-NH₂ | | |
| 43 | Y-Aib-QGTFTSDFSK-αMeL-LDKK((2-[2-(2-Amino- | 49 | 4872.5 |
| | ethoxy)-ethoxy]-acetyl)-(γ-Glu)-CO—(CH₂)₁₈—CO₂H)AQ- | | |
| | Aib-AFIEYLLE-Aib-GPSSGAPPPGGS-NH₂ | | |
| 44 | Y-Aib-QGTFTSDFSK-αMeL-LDKK((2-[2-(2-Amino- | 50 | 4902.5 |
| | ethoxy)-ethoxy]-acetyl)-(γ-Glu)-CO—(CH₂)₁₈—CO₂H)AQ- | | |
| | Aib-AFIEYLLE-Aib-GPSSGAPPPSSG-NH₂ | | |
| 45 | Y-Aib-QGTFTSDFSK-αMeL-LDKK((2-[2-(2-Amino- | 51 | 4902.5 |
| | ethoxy)-ethoxy]-acetyl)-(γ-Glu)-CO—(CH₂)₁₈—CO₂H)AQ- | | |
| | Aib-AFIEYLLE-Aib-GPSSGAPPPSGS-NH₂ | | |
| 46 | Y-Aib-QGTFTSDFSK-αMeL-LDKK((2-[2-(2-Amino- | 52 | 4974.6 |
| | ethoxy)-ethoxy]-acetyl)-(γ-Glu)-CO—(CH₂)₁₆—CO₂H)AQ- | | |
| | Aib-AFIEYLLE-Aib-GPSSGEPPPSEG-NH₂ | | |
| 47 | Y-Aib-QGTFTSDFSK-αMeL-LDKK((2-[2-(2-Amino- | 53 | 4930.6 |
| | ethoxy)-ethoxy]-acetyl)-(γ-Glu)-CO—(CH₂)₁₈—CO₂H)AQ- | | |
| | Aib-AFIEYLLEGAPSSGAPPPSEG-NH₂ | | |
| 48 | Y-Aib-QGTFTSDFSK-αMeL-LDKK((2-[2-(2-Amino- | 54 | 4888.5 |
| | ethoxy)-ethoxy]-acetyl)-(γ-Glu)-CO—(CH₂)₁₆—CO₂H)AQ- | | |
| | Aib-AFIEYLLEGGPSSGAPPPSEG-NH₂ | | |
| 49 | Y-Aib-QGTFTSDFSK-αMeL-LDKK((2-[2-(2-Amino- | 55 | 4888.5 |
| | ethoxy)-ethoxy]-acetyl)-(γ-Glu)-COγγ-(CH₂)₁₆—CO₂H)AQ- | | |
| | Aib-AFIEYLIEGGPSSGAPPPSEG-NH₂ | | |
| 50 | Y-Aib-QGTFTSDFS-Orn-αMeL-LDKK((2-[2-(2-Amino- | 56 | 4874.5 |
| | ethoxy)-ethoxy]-acetyl)-(γ-Glu)-CO—(CH₂)₁₆—CO₂H)AQ- | | |
| | Aib-AFIEYLLEGGPSSGAPPPSEG-NH₂ | | |
| 51 | Y-Aib-QGTFTSDFSK-αMeL-LDKK((2-[2-(2-Amino- | 57 | 4945.5 |
| | ethoxy)-ethoxy]-acetyl)-(γ-Glu)-CO—(CH₂)₁₆—CO₂H)AQ- | | |
| | Aib-QFIEYLLEGGPSSGAPPPSEG-NH₂ | | |
| 52 | Y-Aib-QGTFTSDFSK-αMeL-LDKK((2-[2-(2-Amino- | 58 | 4958.6 |
| | ethoxy)-ethoxy]-acetyl)-(γ-Glu)-CO—(CH₂)₁₈—CO₂H)AQ- | | |
| | Aib-AFIEYLLEGGPSSGAPPP-gE-EG-NH₂ | | |
| 53 | Y-Aib-QGTFTSDFSK-αMeL-LDKK((2-[2-(2-Amino- | 59 | 4958.6 |
| | ethoxy)-ethoxy]-acetyl)-(γ-Glu)-CO—(CH₂)₁₈—CO₂H)AQ- | | |
| | Aib-AFIEYLLEGGPSSGAPPP-gE-GE-NH₂ | | |
| 54 | Y-Aib-QGTFTSDFSK-αMeL-LDKK((2-[2-(2-Amino- | 60 | 5089.7 |
| | ethoxy)-ethoxy]-acetyl)-(γ-Glu)-CO—(CH₂)₁₈—CO₂H)AQ- | | |
| | Aib-AFIEYLLEGGPSSGEPPPGEG-(2-[2-(2-Amino- | | |
| | ethoxy)-ethoxy]-acetic amide) | | |
| 55 | Y-Aib-QGTFTSDFSK-αMeL-LDKK((2-[2-(2-Amino- | 61 | 5059.7 |
| | ethoxy)-ethoxy]-acetyl)₂-(γ-Glu)-CO—(CH₂)₁₈—CO₂H))AQ- | | |
| | Aib-AFIEYLLE-Aib-GPSSGAPPPGEG-NH₂ | | |
| 56 | Y-Aib-QGTFTSDFSK-αMeL-LDKK((2-[2-(2-Amino- | 62 | 5033.6 |
| | ethoxy)-ethoxy]-acetyl)-(γ-Glu)-CO—(CH₂)₁₆—CO₂H)AQ- | | |
| | Aib-AFIEYLLEGGPSSGAPPPSEG-(2-[2-(2-Amino- | | |
| | ethoxy)-ethoxy]-acetic amide) | | |
| 57 | Y-Aib-QGTFTSDFSK-αMeL-LDKK((2-[2-(2-Amino- | 63 | 4916.5 |
| | ethoxy)-ethoxy]-acetyl)-(γ-Glu)-CO—(CH₂)₁₆—CO₂H)AQ- | | |
| | Aib-AFIEYLLE-Aib-GPSSGAPPPSEG-NH₂ | | |
| 58 | Y-Aib-QGTFTSDFSK-αMeL-LDKK((γ-Glu)₂-CO—(CH₂)₁₆- | 64 | 4872.4 |
| | CO₂H)AQ-Aib-AFIEYLLEGGPSSGAPPPSEG-NH₂ | | |
| 59 | Y-Aib-QGTFTSDFS-Orn-αMeL-LDKK((2-[2-(2-Amino- | 65 | 4960.5 |
| | ethoxy)-ethoxy]-acetyl)-(γ-Glu)-CO—(CH₂)₁₈—CO₂H)AQ- | | |
| | Aib-AFIEYLLEGGPSSGEPPPSEG-NH₂ | | |
| 60 | Y-Aib-QGTFTSDFS-Orn-αMeL-LDKK((2-[2-(2-Amino- | 66 | 4844.5 |
| | ethoxy)-ethoxy]-acetyl)-(γ-Glu)-CO—(CH₂)₁₈—CO₂H)AQ- | | |
| | Aib-AFIEYLLAGGPSSGAPPPSEG-NH₂ | | |
| 61 | Y-Aib-QGTFTSDFS-Orn-αMeL-LDKK((2-[2-(2-Amino- | 67 | 4930.6 |
| | ethoxy)-ethoxy]-acetyl)-(γ-Glu)-CO—(CH₂)₁₈—CO₂H)AQ- | | |
| | Aib-AFIEYLLE-Aib-GPSSGAPPPSEG-NH₂ | | |
| 62 | Y-Aib-QGTFTSDFS-Orn-αMeL-LDKK((2-[2-(2-Amino- | 68 | 4802.4 |
| | ethoxy)-ethoxy]-acetyl)-(γ-Glu)-CO—(CH₂)₁₆—CO₂H)AQ- | | |
| | Aib-AFIEYLLEGGPSSGAPPPGGS-NH₂ | | |
| 63 | Y-Aib-QGTFTSDFS-Orn-αMeL-LDKK((2-[2-(2-Amino- | 69 | 4844.4 |
| | ethoxy)-ethoxy]-acetyl)-(γ-Glu)-CO—(CH₂)₁₆—CO₂H)AQ- | | |
| | Aib-AFIEYLLEGGPSSGAPPPGGE-NH₂ | | |
| 64 | Y-Aib-QGTFTSDFS-Orn-αMeL-LDKK((2-[2-(2-Amino- | 70 | 4859.4 |
| | ethoxy)-ethoxy]-acetyl)-(γ-Glu)-CO—(CH₂)₁₆—CO₂H)AQ- | | |
| | Aib-AFIEYLLEGGPSSGAPPPGGSG-NH₂ | | |
| 65 | Y-Aib-QGTFTSDFS-Orn-αMeL-LDKK((2-[2-(2-Amino- | 71 | 4931.5 |
| | ethoxy)-ethoxy]-acetyl)-(γ-Glu)-CO—(CH₂)₁₆—CO₂H)AQ- | | |
| | Aib-AFIEYLLEGGPSSGAPPPGGSE-NH₂ | | |
| 66 | Y-Aib-QGTFTSDFS-Orn-αMeL-LDKK((2-[2-(2-Amino- | 72 | 4947.5 |
| | ethoxy)-ethoxy]-acetyl)-(γ-Glu)-CO—(CH₂)₁₆—CO₂H)AQ- | | |
| | Aib-AFIEYLLEGGPSSGAPPPGGS-(2-[2-(2-Amino- | | |
| | ethoxy)-ethoxy]-acetic amide) | | |
| 67 | Y-Aib-QGTFTSDFS-Dab-αMeL-LDKK((2-[2-(2-Amino- | 73 | 4788.4 |
| | ethoxy)-ethoxy]-acetyl)-(γ-Glu)-CO—(CH₂)₁₆—CO₂H)AQ- | | |
| | Aib-AFIEYLLEGGPSSGAPPPGGS-NH₂ | | |
| 68 | Y-Aib-QGTFTSDFS-Dap-αMeL-LDKK((2-[2-(2-Amino- | 74 | 4774.3 |
| | ethoxy)-ethoxy]-acetyl)-(γ-Glu)-CO—(CH₂)₁₆—CO₂H)AQ- | | |
| | Aib-AFIEYLLEGGPSSGAPPPGGS-NH₂ | | |
| 69 | Y-Aib-QGTFTSDFS-Orn-αMeL-LDKK((2-[2-(2-Amino- | 75 | 5103.7 |
| | ethoxy)-ethoxy]-acetyl)₂-(γ-Glu)-CO—(CH₂)₁₈—CO₂H))AQ- | | |
| | Aib-AFIEYLLE-Aib-GPSSGEPPPGEG-NH₂ | | |
| 70 | Y-Aib-QGTFTSDFS-Orn-αMeL-LDKK((2-[2-(2-Amino- | 76 | 5045.7 |
| | ethoxy)-ethoxy]-acetyl)₂-(γ-Glu)-CO—(CH₂)₁₈—CO₂H))AQ- | | |
| | Aib-AFIEYLLE-Aib-GPSSGAPPPGEG-NH₂ | | |
| 71 | Y-Aib-QGTFTSDFS-Orn-αMeL-LDKK((2-[2-(2-Amino- | 77 | 5075.7 |
| | ethoxy)-ethoxy]-acetyl)₂-(γ-Glu)-CO—(CH₂)₁₈—CO₂H))AQ- | | |
| | Aib-AFIEYLLE-Aib-GPSSGAPPPSEG-NH₂ | | |
| 72 | Y-Aib-QGTFTSDFS-Orn-αMeL-LDKK((2-[2-(2-Amino- | 78 | 5061.7 |
| | ethoxy)-ethoxy]-acetyl)₂-(γ-Glu)-CO—(CH₂)₁₈—CO₂H))AQ- | | |
| | Aib-AFIEYLLEaGPSSGAPPPSEG | | |
| 73 | Y-Aib-QGTFTSDFS-Orn-αMeL-LDKK((2-[2-(2-Amino- | 79 | 4888.5 |
| | ethoxy)-ethoxy]-acetyl)-(γ-Glu)-CO—(CH₂)₁₈—CO₂H)AQ- | | |
| | Aib-AFIEYLLE-Aib-GPSSGAPPPSGS-NH₂ | | |
| 74 | Y-Aib-QGTFTSDFS-Orn-αMeL-LDKK((2-[2-(2-Amino- | 80 | 4860.5 |
| | ethoxy)-ethoxy]-acetyl)-(γ-Glu)-CO—(CH₂)₁₆—CO₂H)AQ- | | |
| | Aib-AFIEYLLE-Aib-GPSSGAPPPSGS-NH₂ | | |
| 75 | Y-Aib-QGTFTSDFS-Orn-αMeL-LDKK((2-[2-(2-Amino- | 81 | 5005.6 |
| | ethoxy)-ethoxy]-acetyl)₂-(γ-Glu)-CO—(CH₂)₁₆—CO₂H))AQ- | | |
| | Aib-AFIEYLLE-Aib-GPSSGAPPPSGS-NH₂ | | |
| 76 | Y-Aib-QGTFTSDFS-Orn-αMeL-LDKK((2-[2-(2-Amino- | 82 | 4802.4 |
| | ethoxy)-ethoxy]-acetyl)-(γ-Glu)-CO—(CH₂)₁₈—CO₂H)AQ- | | |
| | Aib-AFIEYLLAGGPSSGAPPPSGS-NH₂ | | |
| 77 | Y-Aib-QGTFTSDFSR-αMeL-LDKK((2-[2-(2-Amino- | 83 | 4844.5 |
| | ethoxy)-ethoxy]-acetyl)-(γ-Glu)-CO—(CH₂)₁₈—CO₂H)AQ- | | |
| | Aib-AFIEYLLAGGPSSGAPPPSGS-NH₂ | | |
| 78 | Y-Aib-QGTFTSDFS-Orn-αMeL-LDKK((2-[2-(2-Amino- | 84 | 4883.5 |
| | ethoxy)-ethoxy]-acetyl)-(γ-Glu)-CO—(CH₂)₁₈—CO₂H)AQ- | | |
| | Aib-AFIEWLLEGGPSSGAPPPSGS-NH₂ | | |
| 79 | Y-Aib-QGTFTSDFSR-αMeL-LDKK((2-[2-(2-Amino- | 85 | 4902.5 |
| | ethoxy)-ethoxy]-acetyl)-(γ-Glu)-CO—(CH₂)₁₆—CO₂H)AQ- | | |
| | Aib-AFIEYLLE-Aib-GPSSGAPPPSGS-NH₂ | | |
| 80 | Y-Aib-QGTFTSDFSR-αMeL-LDKK((2-[2-(2-Amino- | 86 | 5047.7 |
| | ethoxy)-ethoxy]-acetyl)₂-(γ-Glu)-CO—(CH₂)₁₆—CO₂H))AQ- | | |
| | Aib-AFIEYLLE-Aib-GPSSGAPPPSGS-NH₂ | | |
| 81 | Y-Aib-QGTFTSDFS-Orn-αMeL-LDKK((2-[2-(2-Amino- | 87 | 4830.4 |
| | ethoxy)-ethoxy]-acetyl)-(γ-Glu)-CO—(CH₂)₁₈—CO₂H)AQ- | | |
| | Aib-AFIEYLLAGGPSSGAPPPSGD-NH₂ | | |
| 82 | Y-Aib-QGTFTSDFS-Orn-αMeL-LDKK((2-[2-(2-Amino- | 88 | 4844.5 |
| | ethoxy)-ethoxy]-acetyl)-(γ-Glu)-CO—(CH₂)₁₈—CO₂H)AQ- | | |
| | Aib-AFIEYLLAGGPSSGAPPPSGE-NH₂ | | |
| 83 | Y-Aib-QGTFTSDFS-Orn-αMeL-LDKK((2-[2-(2-Amino- | 89 | 4947.6 |
| | ethoxy)-ethoxy]-acetyl)-(γ-Glu)-CO—(CH₂)₁₈—CO₂H)AQ- | | |
| | Aib-AFIEYLLAGGPSSGAPPPSGS-(2-[2-(2-Amino- | | |
| | ethoxy)-ethoxy]-acetic amide) | | |
| 84 | Y-Aib-QGTFTSDFS-Orn-αMeL-LDKK((2-[2-(2-Amino- | 90 | 4931.5 |
| | ethoxy)-ethoxy]-acetyl)-(γ-Glu)-CO—(CH₂)₁₈—CO₂H)AQ- | | |
| | Aib-AFIEYLLAGGPSSGAPPPSGSE-NH₂ | | |
| 85 | Y-Aib-QGTFTSDFS-Orn-αMeL-LDKK((2-[2-(2-Amino- | 91 | 4802.4 |
| | ethoxy)-ethoxy]-acetyl)-(γ-Glu)-CO—(CH₂)₁₆—CO₂H)AQ- | | |
| | Aib-AFIEYLLAGGPSSGAPPPSGD-NH₂ | | |
| 86 | Y-Aib-QGTFTSDFS-Orn-αMeL-LDKK((2-[2-(2-Amino- | 92 | 4816.4 |
| | ethoxy)-ethoxy]-acetyl)-(γ-Glu)-CO—(CH₂)₁₆—CO₂H)AQ- | | |
| | Aib-AFIEYLLAGGPSSGAPPPSGE-NH₂ | | |
| 87 | Y-Aib-QGTFTSDFS-Orn-αMeL-LDKK((2-[2-(2-Amino- | 93 | 4788.4 |
| | ethoxy)-ethoxy]-acetyl)-(γ-Glu)-CO—(CH₂)₁₆—CO₂H)AQ- | | |
| | Aib-AFIEYLLAGGPSSGAPPPSGT-NH₂ | | |
| 88 | Y-Aib-QGTFTSDFS-Orn-αMeL-LDKK((2-[2-(2-Amino- | 94 | 4903.5 |
| | ethoxy)-ethoxy]-acetyl)-(γ-Glu)-CO—(CH₂)₁₆—CO₂H)AQ- | | |
| | Aib-AFIEYLLAGGPSSGAPPPSGS-γE-NH₂ | | |
| 89 | Y-Aib-QGTFTSDFS-Orn-αMeL-LDKK((2-[2-(2-Amino- | 95 | 4919.5 |
| | ethoxy)-ethoxy]-acetyl)-(γ-Glu)-CO—(CH₂)₁₆—CO₂H)AQ- | | |
| | Aib-AFIEYLLAGGPSSGAPPPSGS-(2-[2-(2-Amino- | | |
| | ethoxy)-ethoxy]-acetic amide) | | |
| 90 | Y-Aib-QGTFTSDFS-Orn-αMeL-LDKK((2-[2-(2-Amino- | 96 | 4903.5 |
| | ethoxy)-ethoxy]-acetyl)-(γ-Glu)-CO—(CH₂)₁₆—CO₂H)AQ- | | |
| | Aib-AFIEYLLAGGPSSGAPPPSGSE-NH₂ | | |
| 91 | Y-Aib-QGTFTSDFS-Orn-αMeL-LDKK((2-[2-(2-Amino- | 97 | 4961.6 |
| | ethoxy)-ethoxy]-acetyl)-(γ-Glu)-CO—(CH₂)₁₆—CO₂H)AQ- | | |
| | Aib-AFIEYLLAGGPSSGAPPPSGE-(2-[2-(2-Amino- | | |
| | ethoxy)-ethoxy]-acetic amide) | | |
| 92 | Y-Aib-QGTFTSDFS-Orn-αMeL-LDKK((2-[2-(2-Amino- | 98 | 4860.5 |
| | ethoxy)-ethoxy]-acetyl)-(γ-Glu)-CO—(CH₂)₁₈—CO₂H)AQ- | | |
| | Aib-AFIEYLLAGGPSSGEPPPSGS-NH₂ | | |
| 93 | Y-Aib-QGTFTSDFS-Orn-αMeL-LDKK((2-[2-(2-Amino- | 99 | 4816.4 |
| | ethoxy)-ethoxy]-acetyl)-(γ-Glu)-CO—(CH₂)₁₆—CO₂H)AQ- | | |
| | Aib-AFIEYLLAGGPSSGAPPPEGS-NH₂ | | |
| 94 | Y-Aib-QGTFTSDFS-Orn-αMeL-LDKK((2-[2-(2-Amino- | 100 | 4832.4 |
| | ethoxy)-ethoxy]-acetyl)-(γ-Glu)-CO—(CH₂)₁₆—CO₂H)AQ- | | |
| | Aib-AFIEYLLAGGPSSGEPPPSGS-NH₂ | | |
| 95 | Y-Aib-QGTFTSDFS-Orn-αMeL-LDKK((2-[2-(2-Amino- | 101 | 4774.4 |
| | ethoxy)-ethoxy]-acetyl)-(γ-Glu)-CO—(CH₂)₁₆—CO₂H)AQ- | | |
| | Aib-AFIEYLLAGGPSSGAPPPSGS-NH₂ | | |
| 96 | Y-Aib-QGTFTSDFS-Orn-αMeL-LDKK((2-[2-(2-Amino- | 102 | 4873.5 |
| | ethoxy)-ethoxy]-acetyl)-(γ-Glu)-CO—(CH₂)₁₆—CO₂H)AQ- | | |
| | Aib-QFIEYLLAGGPSSGAPPPEGS-NH₂ | | |
| 97 | Y-Aib-QGTFTSDFS-Orn-αMeL-LDKK((2-[2-(2-Amino- | 103 | 4874.5 |
| | ethoxy)-ethoxy]-acetyl)-(γ-Glu)-CO—(CH₂)₁₆—CO₂H)AQ- | | |
| | Aib-AFIEYLLAGGPSSGEPPPSGE-NH₂ | | |
| 98 | Y-Aib-QGTFTSDFS-Orn-αMeL-LDKK((2-[2-(2-Amino- | 104 | 4916.5 |
| | ethoxy)-ethoxy]-acetyl)-(γ-Glu)-CO—(CH₂)₁₆—CO₂H)AQ- | | |
| | Aib-AFIEYLLAGGPSSGEPPPEGE-NH₂ | | |
| 99 | Y-Aib-QGTFTSDFS-Orn-αMeL-LDKK((2-[2-(2-Amino- | 105 | 4858.5 |
| | ethoxy)-ethoxy]-acetyl)-(γ-Glu)-CO—(CH₂)₁₆—CO₂H)AQ- | | |
| | Aib-AFIEYLLAGGPSSGAPPPEGE-NH₂ | | |
| 100 | Y-Aib-QGTFTSDFS-Orn-αMeL-LDKK((2-[2-(2-Amino- | 106 | 4925.5 |
| | ethoxy)-ethoxy]-acetyl)-(γ-Glu)-CO—(CH₂)₁₈—CO₂H)AQ- | | |
| | Aib-AFIEWLLEGGPSSGAPPPSGE-NH₂ | | |
| 101 | Y-Aib-QGTFTSDFS-Orn-αMeL-LDKK((2-[2-(2-Amino- | 107 | 4967.6 |
| | ethoxy)-ethoxy]-acetyl)-(γ-Glu)-CO—(CH₂)₁₈—CO₂H)AQ- | | |
| | Aib-AFIEWLLEGGPSSGAPPPEGE-NH₂ | | |
| 102 | Y-Aib-QGTFTSDFS-Orn-αMeL-LDKK((2-[2-(2-Amino- | 108 | 4944.5 |
| | ethoxy)-ethoxy]-acetyl)-(γ-Glu)-CO—(CH₂)₁₈—CO₂H)AQ- | | |
| | Aib-AFIEYLLAGGPSSGEPPPEGE-NH₂ | | |
| 103 | Y-Aib-QGTFTSDFS-Orn-αMeL-LDKK((2-[2-(2-Amino- | 109 | 4925.5 |
| | ethoxy)-ethoxy]-acetyl)-(γ-Glu)-CO—(CH₂)₁₈—CO₂H)AQ- | | |
| | Aib-AFIEWLLAGGPSSGEPPPSGE-NH₂ | | |
| 104 | Y-Aib-QGTFTSDFS-Orn-αMeL-LDKK((2-[2-(2-Amino- | 110 | 4941.5 |
| | ethoxy)-ethoxy]-acetyl)-(γ-Glu)-CO—(CH₂)₁₈—CO₂H)AQ- | | |
| | Aib-AFIEWLLEGG-Hyp-SSGAPPPSGE-NH₂ | | |
| 105 | Y-Aib-QGTFTSDFS-Orn-αMeL-LDKK((2-[2-(2-Amino- | 111 | 4941.5 |
| | ethoxy)-ethoxy]-acetyl)-(γ-Glu)-CO—(CH₂)₁₈—CO₂H)AQ- | | |
| | Aib-AFIEWLLEGGPSSGAPP-Hyp-SGE-NH₂ | | |
| 106 | Y-Aib-QGTFTSDFS-Orn-αMeL-LDKK((2-[2-(2-Amino- | 112 | 4906.5 |
| | ethoxy)-ethoxy]-acetyl)-(γ-Glu)-CO—(CH₂)₁₈—CO₂H)AQ- | | |
| | Aib-AFIEYLLAGGTSSGEPPPSGE-NH₂ | | |
| 107 | Y-Aib-QGTFTSDFS-Orn-αMeL-LDKK((2-[2-(2-Amino- | 113 | 5019.6 |
| | ethoxy)-ethoxy]-acetyl)₂-(γ-Glu)-CO—(CH₂)₁₆—CO₂H))AQ- | | |
| | Aib-AFIEYLLEGGPSSGAPPPSGE-NH₂ | | |
| 108 | Y-Aib-QGTFTSDFSR-αMeL-LDKK((2-[2-(2-Amino- | 114 | 4916.5 |
| | ethoxy)-ethoxy]-acetyl)-(γ-Glu)-CO—(CH₂)₁₆—CO₂H)AQ- | | |
| | Aib-AFIEYLLEGGPSSGAPPPSGE-NH₂ | | |
| 109 | Y-Aib-QGTFTSDFSR-αMeL-LDKK((2-[2-(2-Amino- | 115 | 5061.7 |
| | ethoxy)-ethoxy]-acetyl)₂-(γ-Glu)-CO—(CH₂)₁₆—CO₂H))AQ- | | |
| | Aib-AFIEYLLEGGPSSGAPPPSGE-NH₂ | | |
| 110 | Y-Aib-QGTFTSDFS-Orn-αMeL-LDKK((2-[2-(2-Amino- | 116 | 4902.5 |
| | ethoxy)-ethoxy]-acetyl)-(γ-Glu)-CO—(CH₂)₁₆—CO₂H)AQ- | | |
| | Aib-AFIEYLLE-Aib-GPSSGAPPPSGE-NH₂ | | |
| 111 | Y-Aib-QGTFTSDFS-Orn-αMeL-LDKK((2-[2-(2-Amino- | 117 | 5047.7 |
| | ethoxy)-ethoxy]-acetyl)₂-(γ-Glu)-CO—(CH₂)₁₆—CO₂H))AQ- | | |
| | Aib-AFIEYLLE-Aib-GPSSGAPPPSGE-NH₂ | | |
| 112 | Y-Aib-QGTFTSD-4Pal-S-Orn-αMeL-LDKK((2-[2-(2- | 118 | 4817.4 |
| | Amino-ethoxy)-ethoxy]-acetyl)-(γ-Glu)-CO—(CH₂)₁₆- | | |
| | CO₂H)AQ-Aib-AFIEYLLAGGPSSGAPPPSGE-NH₂ | | |
| 113 | Y-Aib-QGTFTSD-4Pal-SR-αMeL-LDKK((2-[2-(2-Amino- | 119 | 4859.4 |
| | ethoxy)-ethoxy]-acetyl)-(γ-Glu)-CO—(CH₂)₁₆—CO₂H)AQ- | | |
| | Aib-AFIEYLLAGGPSSGAPPPSGE-NH₂ | | |
| 114 | Y-Aib-QGTFTSD-4Pal-SR-αMeL-LDKK((2-[2-(2-Amino- | 120 | 4945.5 |
| | ethoxy)-ethoxy]-acetyl)-(γ-Glu)-CO—(CH₂)₁₆—CO₂H)AQ- | | |
| | Aib-AFIEYLLE-Aib-GPSSGAPPPSGE-NH₂ | | |
| 115 | Y-Aib-QGTFTSD-4Pal-S-Orn-αMeL-LDKK((2-[2-(2- | 121 | 4956.5 |
| | Amino-ethoxy)-ethoxy]-acetyl)-(γ-Glu)-CO—(CH₂)₁₆- | | |
| | CO₂H)AQ-Aib-AFIEWLLEGGPSSGEPPPSGE-NH₂ | | |
| 116 | Y-Aib-QGTFTSDFS-Orn-αMeL-LDKK((2-[2-(2-Amino- | 122 | 5091.7 |
| | ethoxy)-ethoxy]-acetyl)₂-(γ-Glu)-CO—(CH₂)₁₆—CO₂H))AQ- | | |
| | Aib-AFIEYLLEaGPSSGEPPPSEG-NH₂ | | |
| 117 | Y-Aib-QGTFTSDFS-Orn-αMeL-LDKK((2-[2-(2-Amino- | 123 | 5091.7 |
| | ethoxy)-ethoxy]-acetyl)₂-(γ-Glu)-CO—(CH₂)₁₆—CO₂H))AQ- | | |
| | Aib-AFIEYLLEaGPSSGEPPPSGE-NH₂ | | |
| 118 | Y-Aib-QGTFTSDFS-Orn-αMeL-LDKK((2-[2-(2-Amino- | 124 | 5019.6 |
| | ethoxy)-ethoxy]-acetyl)₂-(γ-Glu)-CO—(CH₂)₁₆—CO₂H))AQ- | | |
| | Aib-AFIEYLLEGGPSSGAPPPGES-NH₂ | | |
| 119 | Y-Aib-QGTFTSDFS-Or-αMeL-LDKK((2-[2-(2-Amino- | 125 | 4897.5 |
| | ethoxy)-ethoxy]-acetyl)-(γ-Glu)-CO—(CH₂)₁₆—CO₂H)AQ- | | |
| | Aib-AFIEWLLEGGPSSGAPPPSGE-NH₂ | | |
| 120 | Y-Aib-QGTFTSDFS-Orn-αMeL-LDKK((2-[2-(2-Amino- | 126 | 4939.5 |
| | ethoxy)-ethoxy]-acetyl)-(γ-Glu)-CO—(CH₂)₁₆—CO₂H)AQ- | | |
| | Aib-AFIEWLLEGGPSSGAPPPEGE-NH₂ | | |
| 121 | Y-Aib-QGTFTSDFS-Orn-αMeL-LDKK((2-[2-(2-Amino- | 127 | 4897.5 |
| | ethoxy)-ethoxy]-acetyl)-(γ-Glu)-CO—(CH₂)₁₆—CO₂H)AQ- | | |
| | Aib-AFIEWLLEGGPSSGAPPPEGS-NH₂ | | |
| 122 | Y-Aib-QGTFTSDFS-Orn-αMeL-LDKK((2-[2-(2-Amino- | 128 | 4937.5 |
| | ethoxy)-ethoxy]-acetyl)-(γ-Glu)-CO—(CH₂)₁₆—CO₂H)AQ- | | |
| | Aib-AFIEWLLEGGHSSGAPPPSGE-NH₂ | | |
| 123 | Y-Aib-QGTFTSDFS-Orn-αMeL-LDKK((2-[2-(2-Amino- | 129 | 4987.5 |
| | ethoxy)-ethoxy]-acetyl)-(γ-Glu)-CO—(CH₂)₁₆—CO₂H)AQ- | | |
| | Aib-AFIEWLLEGGESSGEPPPSGE-NH₂ | | |
| 124 | Y-Aib-QGTFTSDFS-Orn-αMeL-LDKK((2-[2-(2-Amino- | 130 | 4995.6 |
| | ethoxy)-ethoxy]-acetyl)-(γ-Glu)-CO—(CH₂)₁₆—CO₂H)AQ- | | |
| | Aib-AFIEWLLEGGHSSGEPPPSGE-NH₂ | | |
| 125 | Y-Aib-QGTFTSDFS-Orn-αMeL-LDKK((2-[2-(2-Amino- | 131 | 4929.5 |
| | ethoxy)-ethoxy]-acetyl)-(γ-Glu)-CO—(CH₂)₁₆—CO₂H)AQ- | | |
| | Aib-AFIEWLLEGGESSGAPPPEGS-NH₂ | | |
| 126 | Y-Aib-QGTFTSDFS-Orn-αMeL-LDKK((2-[2-(2-Amino- | 132 | 4937.5 |
| | ethoxy)-ethoxy]-acetyl)-(γ-Glu)-CO—(CH₂)₁₆—CO₂H)AQ- | | |
| | Aib-AFIEWLLEGGHSSGAPPPEGS-NH₂ | | |
| 127 | Y-Aib-QGTFTSDFS-Orn-αMeL-LDKK((2-[2-(2-Amino- | 133 | 4995.6 |
| | ethoxy)-ethoxy]-acetyl)-(γ-Glu)-CO—(CH₂)₁₆—CO₂H)AQ- | | |
| | Aib-AFIEWLLEGGHSSGEPPPEGS-NH₂ | | |
| 128 | Y-Aib-QGTFTSDFS-Orn-αMeL-LDKK((2-[2-(2-Amino- | 134 | 5033.6 |
| | ethoxy)-ethoxy]-acetyl)₂-(γ-Glu)-CO—(CH₂)₁₆—CO₂H))AQ- | | |
| | Aib-AFIEYLLEaGPSSGAPPPSGE-NH₂ | | |
| 129 | Y-Aib-QGTFTSDFS-Orn-αMeL-LDKK((2-[2-(2-Amino- | 135 | 4888.5 |
| | ethoxy)-ethoxy]-acetyl)-(γ-Glu)-CO—(CH₂)₁₆—CO₂H)AQ- | | |
| | Aib-AFIEYLLEaGPSSGAPPPSGE-NH₂ | | |
| 130 | Y-Aib-QGTFTSDFS-Orn-αMeL-LDKK((2-[2-(2-Amino- | 136 | 4874.5 |
| | ethoxy)-ethoxy]-acetyl)-(γ-Glu)-CO—(CH₂)₁₆—CO₂H)AQ- | | |
| | Aib-AFIEYLLEGGPSSGAPPPEGS-NH₂ | | |
| 131 | Y-Aib-QGTFTSDFS-Or-αMeL-LDKK((2-[2-(2-Amino- | 137 | 4890.5 |
| | ethoxy)-ethoxy]-acetyl)-(γ-Glu)-CO—(CH₂)₁₆—CO₂H)AQ- | | |
| | Aib-AFIEYLLEGGPSSGEPPPSGS-NH₂ | | |
| 132 | Y-Aib-QGTFTSD-4Pal-SR-αMeL-LDKK((2-[2-(2-Amino- | 138 | 4935.5 |
| | ethoxy)-ethoxy]-acetyl)-(γ-Glu)-CO—(CH₂)₁₆—CO₂H)AQ- | | |
| | Aib-AFIEYLLE-Aib-GESSGAPPPSGS-NH₂ | | |
| 133 | Y-Aib-QGTFTSDFS-Dab-αMeL-LDKK((2-[2-(2-Amino- | 139 | 4846.4 |
| | ethoxy)-ethoxy]-acetyl)-(γ-Glu)-CO—(CH₂)₁₆—CO₂H)AQ- | | |
| | Aib-AFIEYLLE-Aib-GPSSGAPPPSGS-NH₂ | | |
| 134 | Y-Aib-QGTFTSDFS-Dap-αMeL-LDKK((2-[2-(2-Amino- | 140 | 4832.4 |
| | ethoxy)-ethoxy]-acetyl)-(γ-Glu)-CO—(CH₂)₁₆—CO₂H)AQ- | | |
| | Aib-AFIEYLLE-Aib-GPSSGAPPPSGS-NH₂ | | |
| 135 | Y-Aib-QGTFTSDFS-Orn-αMeL-LDKK((2-[2-(2-Amino- | 141 | 4946.5 |
| | ethoxy)-ethoxy]-acetyl)-(γ-Glu)-CO—(CH₂)₁₆—CO₂H)AQ- | | |
| | Aib-AFIEYLLEaGPSSGEPPPSGE-NH₂ | | |
| 136 | Y-Aib-QGTFTSDFS-Orn-αMeL-LDKK((2-[2-(2-Amino- | 142 | 4913.5 |
| | ethoxy)-ethoxy]-acetyl)-(γ-Glu)-CO—(CH₂)₁₆—CO₂H)AQ- | | |
| | Aib-AFIEWLLEGGPSSGA-Hyp-PPSGE-NH₂ | | |
| 137 | Y-Aib-QGTFTSDFS-Orn-αMeL-LDKK((2-[2-(2-Amino- | 143 | 4913.5 |
| | ethoxy)-ethoxy]-acetyl)-(γ-Glu)-CO—(CH₂)₁₆—CO₂H)AQ- | | |
| | Aib-AFIEWLLEGGPSSGAP-Hyp-PSGE-NH₂ | | |
| 138 | Y-Aib-QGTFTSDFS-Orn-αMeL-LDKK((2-[2-(2-Amino- | 144 | 4913.5 |
| | ethoxy)-ethoxy]-acetyl)-(γ-Glu)-CO—(CH₂)₁₆—CO₂H)AQ- | | |
| | Aib-AFIEWLLEGGPSSGAPP-Hyp-SGE-NH₂ | | |
| 139 | Y-Aib-QGTFTSDFS-Orn-αMeL-LDKK((2-[2-(2-Amino- | 145 | 4832.4 |
| | ethoxy)-ethoxy]-acetyl)₂-(γ-Glu)-CO—(CH₂)₁₆—CO₂H))AQ- | | |
| | Aib-AFIEYLLEGGPSSGAPPPSGS-NH₂ | | |
| 140 | Y-Aib-QGTFTSDFS-Orn-αMeL-LDKK((2-[2-(2-Amino- | 146 | 4977.6 |
| | ethoxy)-ethoxy]-acetyl)₂-(γ-Glu)-CO—(CH₂)₁₆—CO₂H))AQ- | | |
| | Aib-AFIEYLLEGGPSSGAPPPSGS-NH₂ | | |
| 141 | Y-Aib-QGTFTSDFSK-αMeL-LDKK((2-[2-(2-Amino- | 147 | 4846.4 |
| | ethoxy)-ethoxy]-acetyl)-(γ-Glu)-CO—(CH₂)₁₆—CO₂H)AQ- | | |
| | Aib-AFIEYLLEGGPSSGAPPPSGS-NH₂ | | |
| 142 | Y-Aib-QGTFTSDFSK-αMeL-LDKK((2-[2-(2-Amino- | 148 | 4991.6 |
| | ethoxy)-ethoxy]-acetyl)₂-(γ-Glu)-CO—(CH₂)₁₆—CO₂H))AQ- | | |
| | Aib-AFIEYLLEGGPSSGAPPPSGS-NH₂ | | |
| 143 | Y-Aib-QGTFTSDFSR-αMeL-LDKK((2-[2-(2-Amino- | 149 | 4874.5 |
| | ethoxy)-ethoxy]-acetyl)-(γ-Glu)-CO—(CH₂)₁₆—CO₂H)AQ- | | |
| | Aib-AFIEYLLEGGPSSGAPPPSGS-NH₂ | | |
| 144 | Y-Aib-QGTFTSDFSR-αMeL-LDKK((2-[2-(2-Amino- | 150 | 5019.6 |
| | ethoxy)-ethoxy]-acetyl)₂-(γ-Glu)-CO—(CH₂)₁₆—CO₂H))AQ- | | |
| | Aib-AFIEYLLEGGPSSGAPPPSGS-NH₂ | | |
| 145 | Y-Aib-QGTFTSDFS-Or-αMeL-LDKK((2-[2-(2-Amino- | 151 | 4864.4 |
| | ethoxy)-ethoxy]-acetyl)-(γ-Glu)-CO—(CH₂)₁₆—CO₂H)AQ- | | |
| | Aib-AFIEYLLEGGESSGAPPPSGS-NH₂ | | |
| 146 | Y-Aib-QGTFTSDFSK-αMeL-LDKK((2-[2-(2-Amino- | 152 | 4878.4 |
| | ethoxy)-ethoxy]-acetyl)-(γ-Glu)-CO—(CH₂)₁₆—CO₂H)AQ- | | |
| | Aib-AFIEYLLEGGESSGAPPPSGS-NH₂ | | |
| 147 | Y-Aib-QGTFTSDFSK-αMeL-LDKK((2-[2-(2-Amino- | 153 | 5023.6 |
| | ethoxy)-ethoxy]-acetyl)₂-(γ-Glu)-CO—(CH₂)₁₆—CO₂H))AQ- | | |
| | Aib-AFIEYLLEGGESSGAPPPSGS-NH₂ | | |
| 148 | Y-Aib-QGTFTSDFSR-αMeL-LDKK((2-[2-(2-Amino- | 154 | 4906.5 |
| | ethoxy)-ethoxy]-acetyl)-(γ-Glu)-CO—(CH₂)₁₆—CO₂H)AQ- | | |
| | Aib-AFIEYLLEGGESSGAPPPSGS-NH₂ | | |
| 149 | Y-Aib-QGTFTSDFSR-αMeL-LDKK((2-[2-(2-Amino- | 155 | 5051.6 |
| | ethoxy)-ethoxy]-acetyl)₂-(γ-Glu)-CO—(CH₂)₁₆—CO₂H))AQ- | | |
| | Aib-AFIEYLLEGGESSGAPPPSGS-NH₂ | | |
| 150 | Y-Aib-QGTFTSDFSQ-αMeL-LDKK((2-[2-(2-Amino- | 156 | 4846.4 |
| | ethoxy)-ethoxy]-acetyl)-(γ-Glu)-CO—(CH₂)₁₆—CO₂H)AQ- | | |
| | Aib-AFIEYLLEGGPSSGAPPPSGS-NH₂ | | |
| 151 | Y-Aib-QGTFTSDFSQ-αMeL-LDKK((2-[2-(2-Amino- | 157 | 4874.5 |
| | ethoxy)-ethoxy]-acetyl)-(γ-Glu)-CO—(CH₂)₁₆—CO₂H)AQ- | | |
| | Aib-AFIEYLLE-Aib-GPSSGAPPPSGS-NH₂ | | |
| 152 | Y-Aib-QGTFTSDFS-Orn-αMeL-LDKK((2-[2-(2-Amino- | 158 | 4874.5 |
| | ethoxy)-ethoxy]-acetyl)-(γ-Glu)-CO—(CH₂)₁₆—CO₂H)AQ- | | |
| | Aib-AFIEYLLAGGPSSGEPPPEGS-NH₂ | | |
| 153 | Y-Aib-QGTFTSDFS-Orn-αMeL-LDKK((2-[2-(2-Amino- | 159 | 4961.5 |
| | ethoxy)-ethoxy]-acetyl)-(γ-Glu)₂-CO—(CH₂)₁₆—CO₂H)AQ- | | |
| | Aib-AFIEYLLAGGPSSGEPPPSGS-NH₂ | | |
| 154 | Y-Aib-QGTFTSD-4Pal-S-Orn-αMeL-LDKK((2-[2-(2- | 160 | 4833.4 |
| | Amino-ethoxy)-ethoxy]-acetyl)-(γ-Glu)-CO—(CH₂)₁₆- | | |
| | CO₂H)AQ-Aib-AFIEYLLAGGPSSGEPPPSGS-NH₂ | | |
| 155 | Y-Aib-QGTFTSDFS-Orn-αMeL-LDKK((2-[2-(2-Amino- | 161 | 5049.6 |
| | ethoxy)-ethoxy]-acetyl)₂-(γ-Glu)-CO—(CH₂)₁₆—CO₂H))AQ- | | |
| | Aib-AFIEYLLEaGPSSGEPPPSGS-NH₂ | | |
| 156 | Y-Aib-QGTFTSDFS-Orn-αMeL-LDKK((2-[2-(2-Amino- | 162 | 5063.7 |
| | ethoxy)-ethoxy]-acetyl)₂-(γ-Glu)-CO—(CH₂)₁₆—CO₂H))AQ- | | |
| | Aib-AFIEYLLEaGPSSGEPPPSGT-NH₂ | | |
| 157 | Y-Aib-QGTFTSDFS-Or-αMeL-LDKK((2-[2-(2-Amino- | 163 | 5090.7 |
| | ethoxy)-ethoxy]-acetyl)₂-(γ-Glu)-CO—(CH₂)₁₆—CO₂H))AQ- | | |
| | Aib-AFIEYLLEaGPSSGEPPPSGQ-NH₂ | | |
| 158 | Y-Aib-QGTFTSDFS-Orn-αMeL-LDKK((2-[2-(2-Amino- | 164 | 4816.4 |
| | ethoxy)-ethoxy]-acetyl)-(γ-Glu)-CO—(CH₂)₁₆—CO₂H)AQ- | | |
| | Aib-AFIEYLLEGGPSSGAPPPGGT-NH₂ | | |
| 159 | Y-Aib-QGTFTSDFS-Orn-αMeL-LDKK((2-[2-(2-Amino- | 165 | 4843.4 |
| | ethoxy)-ethoxy]-acetyl)-(γ-Glu)-CO—(CH₂)₁₆—CO₂H)AQ- | | |
| | Aib-AFIEYLLEGGPSSGAPPPGGQ-NH₂ | | |
| 160 | Y-Aib-QGTFTSDFS-Orn-αMeL-LDKK((2-[2-(2-Amino- | 166 | 4888.5 |
| | ethoxy)-ethoxy]-acetyl)-(γ-Glu)-CO—(CH₂)₁₆—CO₂H)AQ- | | |
| | Aib-AFIEYLLEGGPSSGAPPPEGT-NH₂ | | |
| 161 | Y-Aib-QGTFTSDFS-Orn-αMeL-LDKK((2-[2-(2-Amino- | 167 | 4835.4 |
| | ethoxy)-ethoxy]-acetyl)-(γ-Glu)-CO—(CH₂)₁₆—CO₂H)AQ- | | |
| | Aib-AFIEYLLEGGESSGAPPPGGS-NH₂ | | |
| 162 | Y-Aib-QGTFTSDFS-Orn-αMeL-LDKK((2-[2-(2-Amino- | 168 | 4843.4 |
| | ethoxy)-ethoxy]-acetyl)-(γ-Glu)-CO—(CH₂)₁₆—CO₂H)AQ- | | |
| | Aib-AFIEYLLEGGHSSGAPPPGGS-NH₂ | | |
| 163 | Y-Aib-QGTFTSDFS-Orn-αMeL-LDKK((2-[2-(2-Amino- | 169 | 4854.4 |
| | ethoxy)-ethoxy]-acetyl)-(γ-Glu)-CO—(CH₂)₁₆—CO₂H)AQ- | | |
| | Aib-AFIEYLLEGG-4Pal-SSGAPPPGGS-NH₂ | | |
| 164 | Y-Aib-QGTFTSDFS-Orn-αMeL-LDKK((2-[2-(2-Amino- | 170 | 4901.4 |
| | ethoxy)-ethoxy]-acetyl)-(γ-Glu)-CO—(CH₂)₁₆—CO₂H)AQ- | | |
| | Aib-AFIEYLLEGGHSSGEPPPGGS-NH₂ | | |
| 165 | Y-Aib-QGTFTSDFS-Orn-αMeL-LDKK((2-[2-(2-Amino- | 171 | 5019.7 |
| | ethoxy)-ethoxy]-acetyl)₂-(γ-Glu)-CO—(CH₂)₁₆—CO₂H))AQ- | | |
| | Aib-AFIEYLLE-Aib-GPSSGAPPPSGT-NH₂ | | |
| 166 | Y-Aib-QGTFTSDFS-Orn-αMeL-LDKK((2-[2-(2-Amino- | 172 | 5063.7 |
| | ethoxy)-ethoxy]-acetyl)₂-(γ-Glu)-CO—(CH₂)₁₆—CO₂H))AQ- | | |
| | Aib-AFIEYLLE-Aib-GPSSGEPPPSGS-NH₂ | | |
| 167 | Y-Aib-QGTFTSDFS-Orn-αMeL-LDKK((2-[2-(2-Amino- | 173 | 5077.7 |
| | ethoxy)-ethoxy]-acetyl)₂-(γ-Glu)-CO—(CH₂)₁₆—CO₂H))AQ- | | |
| | Aib-AFIEYLLE-Aib-GPSSGEPPPSGT-NH₂ | | |
| 168 | Y-Aib-QGTFTSDFS-Orn-αMeL-LDKK((2-[2-(2-Amino- | 174 | 4855.5 |
| | ethoxy)-ethoxy]-acetyl)-(γ-Glu)-CO—(CH₂)₁₆—CO₂H)AQ- | | |
| | Aib-AFIEWLLEGGPSSGAPPPSGS-NH₂ | | |
| 169 | Y-Aib-QGTFTSDFS-Orn-αMeL-LDKK((2-[2-(2-Amino- | 175 | 5082.7 |
| | ethoxy)-ethoxy]-acetyl)₂-(γ-Glu)-CO—(CH₂)₁₆—CO₂H))AQ- | | |
| | Aib-AFIEWLLEGGHSSGAPPPSGE-NH₂ | | |
| 170 | Y-Aib-QGTFTSDFS-Orn-αMeL-LDKK((2-[2-(2-Amino- | 176 | 4895.5 |
| | ethoxy)-ethoxy]-acetyl)-(γ-Glu)-CO—(CH₂)₁₆—CO₂H)AQ- | | |
| | Aib-AFIEWLLEGGHSSGAPPPSGS-NH₂ | | |
| 171 | Y-Aib-QGTFTSDFS-Orn-αMeL-LDKK((2-[2-(2-Amino- | 177 | 4909.5 |
| | ethoxy)-ethoxy]-acetyl)-(γ-Glu)-CO—(CH₂)₁₆—CO₂H)AQ- | | |
| | Aib-AFIEWLLEGGHSSGAPPPSGT-NH₂ | | |
| 172 | Y-Aib-QGTFTSDFS-Orn-αMeL-LDKK((2-[2-(2-Amino- | 178 | 4887.5 |
| | ethoxy)-ethoxy]-acetyl)-(γ-Glu)-CO—(CH₂)₁₆—CO₂H)AQ- | | |
| | Aib-AFIEWLLEGGSSSGAPPPSGE-NH₂ | | |
| 173 | Y-Aib-QGTFTSDFS-Orn-αMeL-LDKK((2-[2-(2-Amino- | 179 | 4845.4 |
| | ethoxy)-ethoxy]-acetyl)-(γ-Glu)-CO—(CH₂)₁₆—CO₂H)AQ- | | |
| | Aib-AFIEWLLEGGSSSGAPPPSGS-NH₂ | | |
| 174 | Y-Aib-QGTFTSDFS-Orn-αMeL-LDKK((2-[2-(2-Amino- | 180 | 4859.4 |
| | ethoxy)-ethoxy]-acetyl)-(γ-Glu)-CO—(CH₂)₁₆—CO₂H)AQ- | | |
| | Aib-AFIEWLLEGGSSSGAPPPSGT-NH₂ | | |
| 175 | Y-Aib-QGTFTSDFS-Orn-αMeL-LDKK((2-[2-(2-Amino- | 181 | 4901.5 |
| | ethoxy)-ethoxy]-acetyl)-(γ-Glu)-CO—(CH₂)₁₆—CO₂H)AQ- | | |
| | Aib-AFIEWLLEGGTSSGAPPPSGE-NH₂ | | |
| 176 | Y-Aib-QGTFTSDFS-Orn-αMeL-LDKK((2-[2-(2-Amino- | 182 | 4860.4 |
| | ethoxy)-ethoxy]-acetyl)-(γ-Glu)-CO—(CH₂)₁₆—CO₂H)AQ- | | |
| | Aib-AFIEWLLEGGTSSGAPPPSGS-NH₂ | | |
| 177 | Y-Aib-QGTFTSDFS-Orn-αMeL-LDKK((2-[2-(2-Amino- | 183 | 4873.5 |
| | ethoxy)-ethoxy]-acetyl)-(γ-Glu)-CO—(CH₂)₁₆—CO₂H)AQ- | | |
| | Aib-AFIEWLLEGGTSSGAPPPSGT-NH₂ | | |
| 178 | Y-Aib-QGTFTSD-F(4CN)-S-Orn-αMeL-LDKK((2-[2-(2- | 184 | 5030.6 |
| | Amino-ethoxy)-ethoxy]-acetyl)₂-(γ-Glu)-CO—(CH₂)₁₆- | | |
| | CO₂H))AQ-Aib-AFIEYLLE-Aib-GPSSGAPPPSGS-NH₂ | | |
| 179 | Y-Aib-QGTFTSDFS-Orn-αMeL-LDKK((2-[2-(2-Amino- | 185 | 5037.6 |
| | ethoxy)-ethoxy]-acetyl)₂-(γ-Glu)-CO—(CH₂)₁₆—CO₂H))AQ- | | |
| | Aib-AFIEYLLE-Aib-GESSGAPPPSGS-NH₂ | | |
| 180 | Y-Aib-QGTFTSDFS-Orn-αMeL-LDKK((2-[2-(2-Amino- | 186 | 5051.7 |
| | ethoxy)-ethoxy]-acetyl)₂-(γ-Glu)-CO—(CH₂)₁₆—CO₂H))AQ- | | |
| | Aib-AFIEYLLE-Aib-GESSGAPPPSGT-NH₂ | | |
| 181 | Y-Aib-QGTFTSDFS-Orn-αMeL-LDKK((2-[2-(2-Amino- | 187 | 5045.7 |
| | ethoxy)-ethoxy]-acetyl)₂-(γ-Glu)-CO—(CH₂)₁₆—CO₂H))AQ- | | |
| | Aib-AFIEYLLE-Aib-GHSSGAPPPSGS-NH₂ | | |
| 182 | Y-Aib-QGTFTSDFS-Orn-αMeL-LDKK((2-[2-(2-Amino- | 188 | 5059.7 |
| | ethoxy)-ethoxy]-acetyl)₂-(γ-Glu)-CO—(CH₂)₁₆—CO₂H))AQ- | | |
| | Aib-AFIEYLLE-Aib-GHSSGAPPPSGT-NH₂ | | |
| 183 | Y-Aib-QGTFTSDFS-Orn-αMeL-LDKK((2-[2-(2-Amino- | 189 | 5056.7 |
| | ethoxy)-ethoxy]-acetyl)₂-(γ-Glu)-CO—(CH₂)₁₆—CO₂H))AQ- | | |
| | Aib-AFIEYLLE-Aib-G-4Pal-SSGAPPPSGS-NH₂ | | |
| 184 | Y-Aib-QGTFTSDFS-Orn-αMeL-LDKK((2-[2-(2-Amino- | 190 | 5070.7 |
| | ethoxy)-ethoxy]-acetyl)₂-(γ-Glu)-CO—(CH₂)₁₆—CO₂H))AQ- | | |
| | Aib-AFIEYLLE-Aib-G-4Pal-SSGAPPPSGT-NH₂ | | |
| 185 | Y-Aib-QGTFTSDFS-Orn-αMeL-LDKK((2-[2-(2-Amino- | 191 | 5079.7 |
| | ethoxy)-ethoxy]-acetyl)₂-(γ-Glu)-CO—(CH₂)₁₆—CO₂H))AQ- | | |
| | Aib-AFIEYLLE-Aib-GESSGAPPPSGE-NH₂ | | |
| 186 | Y-Aib-QGTFTSDFS-Orn-αMeL-LDKK((2-[2-(2-Amino- | 192 | 5087.7 |
| | ethoxy)-ethoxy]-acetyl)₂-(γ-Glu)-CO—(CH₂)₁₆—CO₂H))AQ- | | |
| | Aib-AFIEYLLE-Aib-GHSSGAPPPSGE-NH₂ | | |
| 187 | Y-Aib-QGTFTSD-4Pal-SR-αMeL-LDKK((2-[2-(2-Amino- | 193 | 4935.5 |
| | ethoxy)-ethoxy]-acetyl)-(γ-Glu)-CO—(CH₂)₁₆—CO₂H)AQ- | | |
| | Aib-AFIEYLIE-Aib-GESSGAPPPSGS-NH₂ | | |
| 188 | Y-Aib-QGTFTSD-4Pal-S-Dab-αMeL-LDKK((2-[2-(2- | 194 | 4879.4 |
| | Amino-ethoxy)-ethoxy]-acetyl)-(γ-Glu)-CO—(CH₂)₁₆- | | |
| | CO₂H)AQ-Aib-AFIEYLIE-Aib-GESSGAPPPSGS-NH₂ | | |
| 189 | Y-Aib-QGTFTSDFS-Orn-αMeL-LDKK((2-[2-(2-Amino- | 195 | 5098.7 |
| | ethoxy)-ethoxy]-acetyl)₂-(γ-Glu)-CO—(CH₂)₁₆—CO₂H))AQ- | | |
| | Aib-AFIEYLLE-Aib-G-4Pal-SSGAPPPSGE-NH₂ | | |
| 190 | Y-Aib-QGTFTSD-F(4CN)-S-Orn-αMeL-LDKK((2-[2-(2- | 196 | 4925.5 |
| | Amino-ethoxy)-ethoxy]-acetyl)-(γ-Glu)-CO—(CH₂)₁₆- | | |
| | CO₂H)AQ-Aib-AFIEYLLE-Aib-GHSSGAPPPSGS-NH₂ | | |
| 191 | Y-Aib-QGTFTSD-F(4CN)-S-Orn-αMeL-LDKK((2-[2-(2- | 197 | 4885.5 |
| | Amino-ethoxy)-ethoxy]-acetyl)-(γ-Glu)-CO—(CH₂)₁₆- | | |
| | CO₂H)AQ-Aib-AFIEYLLE-Aib-GPSSGAPPPSGS-NH₂ | | |
| 192 | Y-Aib-QGTFTSDFS-Orn-αMeL-LDKK((2-[2-(2-Amino- | 198 | 4989.6 |
| | ethoxy)-ethoxy]-acetyl)-(γ-Glu)₂-CO—(CH₂)₁₆—CO₂H)AQ- | | |
| | Aib-AFIEYLLE-Aib-GPSSGAPPPSGS-NH₂ | | |
| 193 | Y-Aib-QGTFTSDFS-Orn-αMeL-LDKK((γ-Glu)-(2-[2-(2- | 199 | 4989.6 |
| | Amino-ethoxy)-ethoxy]-acetyl)-(γ-Glu)-CO—(CH₂)₁₆- | | |
| | CO₂H)AQ-Aib-AFIEYLLE-Aib-GPSSGAPPPSGS-NH₂ | | |
| 194 | Y-Aib-QGTFTSDFS-Orn-αMeL-LDKK((2-[2-(2-Amino- | 200 | 5047.7 |
| | ethoxy)-ethoxy]-acetyl)₂-(γ-Glu)-CO—(CH₂)₁₆—CO₂H))AQ- | | |
| | Aib-AFIEYLLE-Aib-GPSSGAPPPEGS-NH₂ | | |
| 195 | Y-Aib-QGTFTSDFS-Orn-αMeL-LDKK((2-[2-(2-Amino- | 201 | 5105.7 |
| | ethoxy)-ethoxy]-acetyl)₂-(γ-Glu)-CO—(CH₂)₁₆—CO₂H))AQ- | | |
| | Aib-AFIEYLLE-Aib-GPSSGEPPPEGS-NH₂ | | |
| 196 | Y-Aib-QGTFTSDFS-Orn-αMeL-LDKK((2-[2-(2-Amino- | 202 | 4803.4 |
| | ethoxy)-ethoxy]-acetyl)-(γ-Glu)-CO—(CH₂)₁₆—CO₂H)AQ- | | |
| | Aib-AFIEYLLEGGPSSGAPPPGGS | | |
| 197 | Y-Aib-QGTFTSDFS-Orn-αMeL-LDKK((2-[2-(2-Amino- | 203 | 4817.4 |
| | ethoxy)-ethoxy]-acetyl)-(γ-Glu)-CO—(CH₂)₁₆—CO₂H)AQ- | | |
| | Aib-AFIEYLLEGGPSSGAPPPGGT | | |
| 198 | Y-Aib-QGTFTSDFS-Orn-αMeL-LDKK((γ-Glu)₂-CO— | 204 | 4786.3 |
| | (CH₂)₁₆—CO₂H)AQ-Aib-AFIEYLLEGGPSSGAPPPGGS- | | |
| | NH₂ | | |
| 199 | Y-Aib-QGTFTSDFS-Orn-αMeL-LDKK((γ-Glu)₂-CO— | 205 | 4816.4 |
| | (CH₂)₁₆—CO₂H)AQ-Aib-AFIEYLLEGGPSSGAPPPSGS- | | |
| | NH₂ | | |
| 200 | Y-Aib-QGTFTSDFS-Orn-αMeL-LDKK((2-[2-(2-Amino- | 206 | 4874.5 |
| | ethoxy)-ethoxy]-acetyl)-(γ-Glu)-CO—(CH₂)₁₆—CO₂H)AQ- | | |
| | Aib-AFIEYLLE-Aib-GPSSGAPPPSGT-NH₂ | | |
| 201 | Y-Aib-QGTFTSDFS-Orn-αMeL-LDKK((γ-Glu)₂-CO— | 207 | 4844.4 |
| | (CH₂)₁₆—CO₂H)AQ-Aib-AFIEYLLE-Aib-GPSSGAPPPSGS- | | |
| | NH₂ | | |
| 202 | Y-Aib-QGTFTSDFS-Orn-αMeL-LDKK((γ-Glu)₃-CO— | 208 | 4973.5 |
| | (CH₂)₁₆—CO₂H)AQ-Aib-AFIEYLLE-Aib-GPSSGAPPPSGS- | | |
| | NH₂ | | |
| 203 | Y-Aib-QGTFTSDFS-Dap-αMeL-LDKK((γ-Glu)₂-CO— | 209 | 4816.4 |
| | (CH₂)₁₆—CO₂H)AQ-Aib-AFIEYLLE-Aib-GPSSGAPPPSGS- | | |
| | NH₂ | | |
| 204 | Y-Aib-QGTFTSDFS-Orn-αMeL-LDKK((γ-Glu)₂-CO— | 210 | 4844.4 |
| | (CH₂)₁₆—CO₂H)AQ-Aib-AFIEYLLEaGPSSGAPPPSGT-NH₂ | | |
| 205 | Y-Aib-QGTFTSDFS-Orn-αMeL-LDKK((γ-Glu)₃-CO— | 211 | 4973.5 |
| | (CH₂)₁₆—CO₂H)AQ-Aib-AFIEYLLEaGPSSGAPPPSGT-NH₂ | | |
| 206 | Y-Aib-QGTFTSDFS-Orn-αMeL-LDKK((2-[2-(2-Amino- | 212 | 4930.5 |
| | ethoxy)-ethoxy]-acetyl)-(γ-Glu)-CO—(CH₂)₁₆—CO₂H)AQ- | | |
| | Aib-AFIEYLLEaGPSSGAPPPEGE-NH₂ | | |
| 207 | Y-Aib-QGTFTSDFS-Orn-αMeL-LDKK((2-[2-(2-Amino- | 213 | 4928.5 |
| | ethoxy)-ethoxy]-acetyl)-(γ-Glu)-CO—(CH₂)₁₆—CO₂H)AQ- | | |
| | Aib-AFIEYLLEaGHSSGAPPPSGE-NH₂ | | |
| 208 | Y-Aib-QGTFTSDFS-Orn-αMeL-LDKK((2-[2-(2-Amino- | 214 | 4961.6 |
| | ethoxy)-ethoxy]-acetyl)-(γ-Glu)-CO—(CH₂)₁₆—CO₂H)AQ- | | |
| | Aib-AFIEYLLEaG-K(Ac)-SSGAPPPSGE-NH₂ | | |
| 209 | Y-Aib-QGTFTSDFS-Orn-αMeL-LDKK((2-[2-(2-Amino- | 215 | 4846.4 |
| | ethoxy)-ethoxy]-acetyl)-(γ-Glu)-CO—(CH₂)₁₆—CO₂H)AQ- | | |
| | Aib-AFIEYLLEaGPSSGAPPPSGS-NH₂ | | |
| 210 | Y-Aib-QGTFTSDFS-Orn-αMeL-LDKK((2-[2-(2-Amino- | 216 | 4860.5 |
| | ethoxy)-ethoxy]-acetyl)-(γ-Glu)-CO—(CH₂)₁₆—CO₂H)AQ- | | |
| | Aib-AFIEYLLEaGPSSGAPPPSGT-NH₂ | | |
| 211 | Y-Aib-QGTFTSDFS-Orn-αMeL-LDKK((2-[2-(2-Amino- | 217 | 4907.5 |
| | ethoxy)-ethoxy]-acetyl)-(γ-Glu)-CO—(CH₂)₁₆—CO₂H)AQ- | | |
| | Aib-AFIEYLLEaGPSSGAPPPSG-4Pal-NH₂ | | |
| 212 | Y-Aib-QGTFTSDFS-Orn-αMeL-LDKK((2-[2-(2-Amino- | 218 | 4847.4 |
| | ethoxy)-ethoxy]-acetyl)-(γ-Glu)-CO—(CH₂)₁₆—CO₂H)AQ- | | |
| | Aib-AFIEYLLEaGPSSGAPPPSGS | | |
| 213 | Y-Aib-QGTFTSDFS-Orn-αMeL-LDKK((2-[2-(2-Amino- | 219 | 4861.5 |
| | ethoxy)-ethoxy]-acetyl)-(γ-Glu)-CO—(CH₂)₁₆—CO₂H)AQ- | | |
| | Aib-AFIEYLLEaGPSSGAPPPSGT | | |
| 214 | Y-Aib-QGTFTSDFS-Orn-αMeL-LDKK((2-[2-(2-Amino- | 220 | 4888.5 |
| | ethoxy)-ethoxy]-acetyl)-(γ-Glu)-CO—(CH₂)₁₆—CO₂H)AQ- | | |
| | Aib-AFIEYLLEaGPSS-Aib-APPPSGT-NH₂ | | |
| 215 | Y-Aib-QGTFTSDFSK-αMeL-LDKK((2-[2-(2-Amino- | 221 | 4878.4 |
| | ethoxy)-ethoxy]-acetyl)-(γ-Glu)-CO—(CH₂)₁₆—CO₂H)AQ- | | |
| | Aib-AFIEYLIEGGESSGAPPPSGS-NH₂ | | |
| 216 | Y-Aib-QGTFTSDFSK-αMeL-LDKK((2-[2-(2-Amino- | 222 | 4906.5 |
| | ethoxy)-ethoxy]-acetyl)-(γ-Glu)-CO—(CH₂)₁₆—CO₂H)AQ- | | |
| | Aib-AFIEYLIE-Aib-GESSGAPPPSGS-NH₂ | | |
| 217 | Y-Aib-QGTFTSDFSK-αMeL-LDKK((2-[2-(2-Amino- | 223 | 4948.5 |
| | ethoxy)-ethoxy]-acetyl)-(γ-Glu)-CO—(CH₂)₁₆—CO₂H)AQ- | | |
| | Aib-AFIEYLIE-Aib-GESSGAPPPSGE-NH₂ | | |
| 218 | Y-Aib-QGTFTSDFS-Orn-αMeL-LDKK((2-[2-(2-Amino- | 224 | 4892.5 |
| | ethoxy)-ethoxy]-acetyl)-(γ-Glu)-CO—(CH₂)₁₆—CO₂H)AQ- | | |
| | Aib-AFIEYLIE-Aib-GESSGAPPPSGS-NH₂ | | |
| 219 | Y-Aib-QGTFTSDFS-Orn-αMeL-LDKK((2-[2-(2-Amino- | 225 | 4934.5 |
| | ethoxy)-ethoxy]-acetyl)-(γ-Glu)-CO—(CH₂)₁₆—CO₂H)AQ- | | |
| | Aib-AFIEYLIE-Aib-GESSGAPPPSGE-NH₂ | | |
| 220 | Y-Aib-QGTFTSDFSR-αMeL-LDKK((2-[2-(2-Amino- | 226 | 4906.5 |
| | ethoxy)-ethoxy]-acetyl)-(γ-Glu)-CO—(CH₂)₁₆—CO₂H)AQ- | | |
| | Aib-AFIEYLIEGGESSGAPPPSGS-NH₂ | | |
| 221 | Y-Aib-QGTFTSDFSR-αMeL-LDKK((2-[2-(2-Amino- | 227 | 4934.5 |
| | ethoxy)-ethoxy]-acetyl)-(γ-Glu)-CO—(CH₂)₁₆—CO₂H)AQ- | | |
| | Aib-AFIEYLIE-Aib-GESSGAPPPSGS-NH₂ | | |
| 222 | Y-Aib-QGTFTSD-4Pal-S-Orn-αMeL-LDKK((2-[2-(2- | 228 | 5012.6 |
| | Amino-ethoxy)-ethoxy]-acetyl)-(γ-Glu)-CO—(CH₂)₁₆- | | |
| | CO₂H)AQ-αMe4Pal-AFIEYLIE-Aib-GESSGAPPPSGE- | | |
| | NH₂ | | |
| 223 | Y-Aib-QGTFTSD-4Pal-S-Orn-αMeL-LDKK((2-[2-(2- | 229 | 4970.5 |
| | Amino-ethoxy)-ethoxy]-acetyl)-(γ-Glu)-CO—(CH₂)₁₆- | | |
| | CO₂H)AQ-αMe4Pal-AFIEYLIE-Aib-GESSGAPPPSGS- | | |
| | NH₂ | | |
| 224 | Y-Aib-QGTFTSD-4Pal-SR-αMeL-LDKK((2-[2-(2-Amino- | 230 | 5012.6 |
| | ethoxy)-ethoxy]-acetyl)-(γ-Glu)-CO—(CH₂)₁₆—CO₂H)AQ- | | |
| | αMe4Pal-AFIEYLIE-Aib-GESSGAPPPSGS-NH₂ | | |
| 225 | Y-Aib-QGTFTSD-4Pal-SR-αMeL-LDKK((2-[2-(2-Amino- | 231 | 5054.6 |
| | ethoxy)-ethoxy]-acetyl)-(γ-Glu)-CO—(CH₂)₁₆—CO₂H)AQ- | | |
| | αMe4Pal-AFIEYLIE-Aib-GESSGAPPPSGE-NH₂ | | |
| 226 | Y-Aib-QGTFTSD-4Pal-SQ-αMeL-LDKK((2-[2-(2-Amino- | 232 | 4984.5 |
| | ethoxy)-ethoxy]-acetyl)-(γ-Glu)-CO—(CH₂)₁₆—CO₂H)AQ- | | |
| | αMe4Pal-AFIEYLIE-Aib-GESSGAPPPSGS-NH₂ | | |
| 227 | Y-Aib-QGTFTSD-4Pal-SQ-αMeL-LDKK((2-[2-(2-Amino- | 233 | 5026.6 |
| | ethoxy)-ethoxy]-acetyl)-(γ-Glu)-CO—(CH₂)₁₆—CO₂H)AQ- | | |
| | αMe4Pal-AFIEYLIE-Aib-GESSGAPPPSGE-NH₂ | | |
| 228 | Y-Aib-QGTFTSDFS-Orn-αMeL-LDKK((2-[2-(2-Amino- | 234 | 5011.6 |
| | ethoxy)-ethoxy]-acetyl)-(γ-Glu)-CO—(CH₂)₁₆—CO₂H)AQ- | | |
| | αMe4Pal-AFIEYLIE-Aib-GESSGAPPPSGE-NH₂ | | |
| 229 | Y-Aib-QGTFTSDFS-Orn-αMeL-LDKK((2-[2-(2-Amino- | 235 | 4969.6 |
| | ethoxy)-ethoxy]-acetyl)-(γ-Glu)-CO—(CH₂)₁₆—CO₂H)AQ- | | |
| | αMe4Pal-AFIEYLIE-Aib-GESSGAPPPSGS-NH₂ | | |
| 230 | Y-Aib-QGTFTSDFSR-αMeL-LDKK((2-[2-(2-Amino- | 236 | 5011.6 |
| | ethoxy)-ethoxy]-acetyl)-(γ-Glu)-CO—(CH₂)₁₆—CO₂H)AQ- | | |
| | αMe4Pal-AFIEYLIE-Aib-GESSGAPPPSGS-NH₂ | | |
| 231 | Y-Aib-QGTFTSDFSR-αMeL-LDKK((2-[2-(2-Amino- | 237 | 5053.6 |
| | ethoxy)-ethoxy]-acetyl)-(γ-Glu)-CO—(CH₂)₁₆—CO₂H)AQ- | | |
| | αMe4Pal-AFIEYLIE-Aib-GESSGAPPPSGE-NH₂ | | |
| 232 | Y-Aib-QGTFTSDFSQ-αMeL-LDKK((2-[2-(2-Amino- | 238 | 4983.5 |
| | ethoxy)-ethoxy]-acetyl)-(γ-Glu)-CO—(CH₂)₁₆—CO₂H)AQ- | | |
| | αMe4Pal-AFIEYLIE-Aib-GESSGAPPPSGS-NH₂ | | |
| 233 | Y-Aib-QGTFTSDFSQ-αMeL-LDKK((2-[2-(2-Amino- | 239 | 5025.6 |
| | ethoxy)-ethoxy]-acetyl)-(γ-Glu)-CO—(CH₂)₁₆—CO₂H)AQ- | | |
| | αMe4Pal-AFIEYLIE-Aib-GESSGAPPPSGE-NH₂ | | |
| 234 | Y-Aib-QGTFTSDFS-Orn-αMeL-LDKK((2-[2-(2-Amino- | 240 | 4818.4 |
| | ethoxy)-ethoxy]-acetyl)-(γ-Glu)-CO—(CH₂)₁₆—CO₂H)AQ- | | |
| | Aib-AFIEYLLEGG-Hyp-SSGAPPPGGS-NH₂ | | |
| 235 | Y-Aib-QGTFTSDFS-Orn-αMeL-LDKK((2-[2-(2-Amino- | 241 | 4818.4 |
| | ethoxy)-ethoxy]-acetyl)-(γ-Glu)-CO—(CH₂)₁₆—CO₂H)AQ- | | |
| | Aib-AFIEYLLEGGPSSGA-Hyp-PPGGS-NH₂ | | |
| 236 | Y-Aib-QGTFTSDFS-Orn-αMeL-LDKK((2-[2-(2-Amino- | 242 | 4818.4 |
| | ethoxy)-ethoxy]-acetyl)-(γ-Glu)-CO—(CH₂)₁₆—CO₂H)AQ- | | |
| | Aib-AFIEYLLEGGPSSGAP-Hyp-PGGS-NH₂ | | |
| 237 | Y-Aib-QGTFTSDFS-Orn-αMeL-LDKK((2-[2-(2-Amino- | 243 | 4818.4 |
| | ethoxy)-ethoxy]-acetyl)-(γ-Glu)-CO—(CH₂)₁₆—CO₂H)AQ- | | |
| | Aib-AFIEYLLEGGPSSGAPP-Hyp-GGS-NH₂ | | |
| 238 | Y-Aib-QGTFTSDFS-Orn-αMeL-LDKK((2-[2-(2-Amino- | 244 | 4888.5 |
| | ethoxy)-ethoxy]-acetyl)-(γ-Glu)-CO—(CH₂)₁₆—CO₂H)AQ- | | |
| | Aib-AFIEYLLE-Aib-GPSS-Aib-APPPSGS-NH₂ | | |
| 239 | Y-Aib-QGTFTSDFS-Orn-αMeL-LDKK((2-[2-(2-Amino- | 245 | 4874.5 |
| | ethoxy)-ethoxy]-acetyl)-(γ-Glu)-CO—(CH₂)₁₆—CO₂H)AQ- | | |
| | Aib-AFIEYLLE-Aib-GPSSG-Aib-PPPSGS-NH₂ | | |
| 240 | Y-Aib-QGTFTSDFS-Orn-αMeL-LDKK((2-[2-(2-Amino- | 246 | 4892.5 |
| | ethoxy)-ethoxy]-acetyl)-(γ-Glu)-CO—(CH₂)₁₆—CO₂H)AQ- | | |
| | Aib-AFIEYLLE-Aib-GESSGAPPPSGS-NH₂ | | |
| 241 | Y-Aib-QGTFTSDFS-Orn-αMeL-LDKK((2-[2-(2-Amino- | 247 | 4900.5 |
| | ethoxy)-ethoxy]-acetyl)-(γ-Glu)-CO—(CH₂)₁₆—CO₂H)AQ- | | |
| | Aib-AFIEYLLE-Aib-GHSSGAPPPSGS-NH₂ | | |
| 242 | Y-Aib-QGTFTSDFS-Orn-αMeL-LDKK((2-[2-(2-Amino- | 248 | 4911.5 |
| | ethoxy)-ethoxy]-acetyl)-(γ-Glu)-CO—(CH₂)₁₆—CO₂H)AQ- | | |
| | Aib-AFIEYLLE-Aib-G-4Pal-SSGAPPPSGS-NH₂ | | |
| 243 | Y-Aib-QGTFTSDFS-Orn-αMeL-LDKK((2-[2-(2-Amino- | 249 | 5029.6 |
| | ethoxy)-ethoxy]-acetyl)-(γ-Glu)₂-CO—(CH₂)₁₆—CO₂H)AQ- | | |
| | Aib-AFIEYLLE-Aib-GHSSGAPPPSGS-NH₂ | | |
| 244 | Y-Aib-QGTFTSDFS-Orn-αMeL-LDKK((γ-Glu)-(2-[2-(2- | 250 | 5021.6 |
| | Amino-ethoxy)-ethoxy]-acetyl)-(γ-Glu)-CO—(CH₂)₁₆- | | |
| | CO₂H)AQ-Aib-AFIEYLLE-Aib-GESSGAPPPSGS-NH₂ | | |
| 245 | Y-Aib-QGTFTSDFS-Orn-αMeL-LDKK((γ-Glu)-(2-[2-(2- | 251 | 5029.6 |
| | Amino-ethoxy)-ethoxy]-acetyl)-(γ-Glu)-CO—(CH₂)₁₆- | | |
| | CO₂H)AQ-Aib-AFIEYLLE-Aib-GHSSGAPPPSGS-NH₂ | | |
| 246 | Y-Aib-QGTFTSDFS-Orn-αMeL-LDKK((2-[2-(2-Amino- | 252 | 4934.5 |
| | ethoxy)-ethoxy]-acetyl)-(γ-Glu)-CO—(CH₂)₁₆—CO₂H)AQ- | | |
| | Aib-AFIEYLLE-Aib-GESSGAPPPSGE-NH₂ | | |
| 247 | Y-Aib-QGTFTSDFS-Orn-αMeL-LDKK((2-[2-(2-Amino- | 253 | 4942.5 |
| | ethoxy)-ethoxy]-acetyl)-(γ-Glu)-CO—(CH₂)₁₆—CO₂H)AQ- | | |
| | Aib-AFIEYLLE-Aib-GHSSGAPPPSGE-NH₂ | | |
| 248 | Y-Aib-QGTFTSDFS-Orn-αMeL-LDKK((2-[2-(2-Amino- | 254 | 4953.6 |
| | ethoxy)-ethoxy]-acetyl)-(γ-Glu)-CO—(CH₂)₁₆—CO₂H)AQ- | | |
| | Aib-AFIEYLLE-Aib-G-4Pal-SSGAPPPSGE-NH₂ | | |
| 249 | Y-Aib-QGTFTSDFS-Orn-αMeL-LDKK((2-[2-(2-Amino- | 255 | 4905.5 |
| | ethoxy)-ethoxy]-acetyl)-(γ-Glu)-CO—(CH₂)₁₆—CO₂H)AQ- | | |
| | Aib-AFIEWLLEGGPSSGAPPPHGS-NH₂ | | |
| 250 | Y-Aib-QGTFTSDFS-Orn-αMeL-LDKK((2-[2-(2-Amino- | 256 | 4869.5 |
| | ethoxy)-ethoxy]-acetyl)-(γ-Glu)-CO—(CH₂)₁₆—CO₂H)AQ- | | |
| | Aib-AFIEWLLEGGPSSGAPPPTGS-NH₂ | | |
| 251 | Y-Aib-QGTFTSDFS-Orn-αMeL-LDKK((2-[2-(2-Amino- | 257 | 4916.5 |
| | ethoxy)-ethoxy]-acetyl)-(γ-Glu)-CO—(CH₂)₁₆—CO₂H)AQ- | | |
| | Aib-AFIEWLLEGGPSSGAPPP-4Pal-GS-NH₂ | | |
| 252 | Y-Aib-QGTFTSDFS-Orn-αMeL-LDKK((2-[2-(2-Amino- | 258 | 4939.5 |
| | ethoxy)-ethoxy]-acetyl)-(γ-Glu)-CO—(CH₂)₁₆—CO₂H)AQ- | | |
| | Aib-AFIEYLLEaG-4Pal-SSGAPPPSGE-NH₂ | | |
| 253 | Y-Aib-QGTFTSDFS-Orn-αMeL-LDKK((2-[2-(2-Amino- | 259 | 5057.7 |
| | ethoxy)-ethoxy]-acetyl)₂-(γ-Glu)-CO—(CH₂)₁₆—CO₂H))AQ- | | |
| | Aib-AFIEYLLEaGPSSGHPPPSGS-NH₂ | | |
| 254 | Y-Aib-QGTFTSDFS-Or-αMeL-LDKK((2-[2-(2-Amino- | 260 | 5068.7 |
| | ethoxy)-ethoxy]-acetyl)₂-(γ-Glu)-CO—(CH₂)₁₆—CO₂H))AQ- | | |
| | Aib-AFIEYLLEaGPSSG-4Pal-PPPSGS-NH₂ | | |
| 255 | Y-Aib-QGTFTSDFS-Orn-αMeL-LDKK((2-[2-(2-Amino- | 261 | 5107.7 |
| | ethoxy)-ethoxy]-acetyl)₂-(γ-Glu)-CO—(CH₂)₁₆—CO₂H))AQ- | | |
| | Aib-AFIEYLLEaGPSSGHPPPSGH-NH₂ | | |
| 256 | Y-Aib-QGTFTSDFS-Or-αMeL-LDKK((2-[2-(2-Amino- | 262 | 5118.7 |
| | ethoxy)-ethoxy]-acetyl)₂-(γ-Glu)-CO—(CH₂)₁₆—CO₂H))AQ- | | |
| | Aib-AFIEYLLEaGPSSGHPPPSG-4Pal-NH₂ | | |
| 257 | Y-Aib-QGTFTSDFS-Orn-αMeL-LDKK((2-[2-(2-Amino- | 263 | 5118.7 |
| | ethoxy)-ethoxy]-acetyl)₂-(γ-Glu)-CO—(CH₂)₁₆—CO₂H))AQ- | | |
| | Aib-AFIEYLLEaGPSSG-4Pal-PPPSGH-NH₂ | | |
| 258 | Y-Aib-QGTFTSDFS-Orn-αMeL-LDKK((2-[2-(2-Amino- | 264 | 5129.8 |
| | ethoxy)-ethoxy]-acetyl)₂-(γ-Glu)-CO—(CH₂)₁₆—CO₂H))AQ- | | |
| | Aib-AFIEYLLEaGPSSG-4Pal-PPPSG-4Pal-NH₂ | | |
| 259 | Y-Aib-QGTFTSDFS-Orn-αMeL-LDKK((2-[2-(2-Amino- | 265 | 4896.5 |
| | ethoxy)-ethoxy]-acetyl)-(γ-Glu)-CO—(CH₂)₁₆—CO₂H)AQ- | | |
| | Aib-AFIEYLLEaGPSSGAPPPSGH-NH₂ | | |
| 260 | Y-Aib-QGTFTSDFS-Orn-αMeL-LDKK((γ-Glu)₂-CO— | 266 | 4830.4 |
| | (CH₂)₁₆—CO₂H)AQ-Aib-AFIEYLLEGGPSSGAPPPSGT- | | |
| | NH₂ | | |
| 261 | Y-Aib-QGTFTSDFS-Orn-αMeL-LDKK((2-[2-(2-Amino- | 267 | 4863.5 |
| | ethoxy)-ethoxy]-acetyl)-(γ-Glu)-CO—(CH₂)₁₆—CO₂H)AQ- | | |
| | Aib-AFIEYLLEGGPSSGAPPPGG-4Pal-NH₂ | | |
| 262 | Y-Aib-QGTFTSDFS-Orn-αMeL-LDKK((2-[2-(2-Amino- | 268 | 4958.6 |
| | ethoxy)-ethoxy]-acetyl)-(γ-Glu)-CO—(CH₂)₁₆—CO₂H)AQ- | | |
| | Aib-AFIEWLLEGGPSSGAPPPEG-4Pal-NH₂ | | |
| 263 | Y-Aib-QGTFTSDFS-Orn-αMeL-LDKK((2-[2-(2-Amino- | 269 | 4873.5 |
| | ethoxy)-ethoxy]-acetyl)-(γ-Glu)-CO—(CH₂)₁₆—CO₂H)AQ- | | |
| | Aib-AFIEWLLEaGSSSGAPPPSGT-NH₂ | | |
| 264 | Y-Aib-QGTFTSDFS-Orn-αMeL-LDKK((2-[2-(2-Amino- | 270 | 4887.5 |
| | ethoxy)-ethoxy]-acetyl)-(γ-Glu)-CO—(CH₂)₁₆—CO₂H)AQ- | | |
| | Aib-AFIEWLLE-Aib-GSSSGAPPPSGT-NH₂ | | |
| 265 | Y-Aib-QGTFTSDFS-Orn-αMeL-LDKK((2-[2-(2-Amino- | 271 | 4951.5 |
| | ethoxy)-ethoxy]-acetyl)₂-(γ-Glu)-CO—(CH₂)₁₆—CO₂H))AQ- | | |
| | Aib-AFIEWLLEaGHSSGAPPPSGE-NH₂ | | |
| 266 | Y-Aib-QGTFTSDFS-Orn-αMeL-LDKK((2-[2-(2-Amino- | 272 | 4965.6 |
| | ethoxy)-ethoxy]-acetyl)₂-(γ-Glu)-CO—(CH₂)₁₆—CO₂H))AQ- | | |
| | Aib-AFIEWLLE-Aib-GHSSGAPPPSGE-NH₂ | | |
| 267 | Y-Aib-QGTFTSDFS-Orn-αMeL-LDKK((2-[2-(2-Amino- | 273 | 4948.5 |
| | ethoxy)-ethoxy]-acetyl)-(γ-Glu)-CO—(CH₂)₁₆—CO₂H)AQ- | | |
| | Aib-AFIEWLLEGG-4Pal-SSGAPPPSGE-NH₂ | | |
| 268 | Y-Aib-QGTFTSDFS-Orn-αMeL-LDKK((2-[2-(2-Amino- | 274 | 4920.5 |
| | ethoxy)-ethoxy]-acetyl)-(γ-Glu)-CO—(CH₂)₁₆—CO₂H)AQ- | | |
| | Aib-AFIEWLLEGG-4Pal-SSGAPPPSGT-NH₂ | | |
| 269 | Y-Aib-QGTFTSDFS-Orn-αMeL-LDKK((2-[2-(2-Amino- | 275 | 4945.5 |
| | ethoxy)-ethoxy]-acetyl)-(γ-Glu)-CO—(CH₂)₁₆—CO₂H)AQ- | | |
| | Aib-AFIEWLLEGGHSSGAPPPSGH-NH₂ | | |
| 270 | Y-Aib-QGTFTSDFS-Orn-αMeL-LDKK((2-[2-(2-Amino- | 276 | 4895.5 |
| | ethoxy)-ethoxy]-acetyl)-(γ-Glu)-CO—(CH₂)₁₆—CO₂H)AQ- | | |
| | Aib-AFIEWLLEGGSSSGAPPPSGH-NH₂ | | |
| 271 | Y-Aib-QGTFTSDFS-Orn-αMeL-LDKK((2-[2-(2-Amino- | 277 | 5052.6 |
| | ethoxy)-ethoxy]-acetyl)₂-(γ-Glu)-CO—(CH₂)₁₆—CO₂H))AQ- | | |
| | Aib-AFIEWLLEGGHSSGAPPPGGE-NH₂ | | |
| 272 | Y-Aib-QGTFTSDFS-Orn-αMeL-LDKK((2-[2-(2-Amino- | 278 | 4829.4 |
| | ethoxy)-ethoxy]-acetyl)-(γ-Glu)-CO—(CH₂)₁₆—CO₂H)AQ- | | |
| | Aib-AFIEWLLEGGSSSGAPPPGGT-NH₂ | | |
| 273 | Y-Aib-QGTFTSDFS-Orn-αMeL-LDKK((2-[2-(2-Amino- | 279 | 4907.5 |
| | ethoxy)-ethoxy]-acetyl)-(γ-Glu)-CO—(CH₂)₁₆—CO₂H)AQ- | | |
| | Aib-AFIEWLLEGGHSSGAPPPGGE-NH₂ | | |
| 274 | Y-Aib-QGTFTSD-4Pal-S-Orn-αMeL-LDKK((2-[2-(2- | 280 | 4908.5 |
| | Amino-ethoxy)-ethoxy]-acetyl)-(γ-Glu)-CO—(CH₂)₁₆- | | |
| | CO₂H)AQ-Aib-AFIEYLLEaGPSSGAPPPSG-4Pal-NH₂ | | |
| 275 | Y-Aib-QGTFTSD-4Pal-S-Orn-αMeL-LDKK((2-[2-(2- | 281 | 4889.5 |
| | Amino-ethoxy)-ethoxy]-acetyl)-(γ-Glu)-CO—(CH₂)₁₆- | | |
| | CO₂H)AQ-Aib-AFIEYLLEaGPSS-Aib-APPPSGT-NH₂ | | |
| 276 | Y-Aib-QGTFTSDFS-Orn-αMeL-LDKK((γ-Glu)-(2-[2-(2- | 282 | 5003.6 |
| | Amino-ethoxy)-ethoxy]-acetyl)-(γ-Glu)-CO—(CH₂)₁₆- | | |
| | CO₂H)AQ-Aib-AFIEYLLE-Aib-GPSSGAPPPSGT-NH₂ | | |
| 277 | Y-Aib-QGTFTSDFS-Orn-αMeL-LDKK((γ-Glu)-(2-[2-(2- | 283 | 5050.7 |
| | Amino-ethoxy)-ethoxy]-acetyl)-(γ-Glu)-CO—(CH₂)₁₆- | | |
| | CO₂H)AQ-Aib-AFIEYLLE-Aib-GPSSGAPPPSG-4Pal-NH₂ | | |
| 278 | Y-Aib-QGTFTSDFS-Orn-αMeL-LDKK((2-[2-(2-Amino- | 284 | 5003.6 |
| | ethoxy)-ethoxy]-acetyl)-(γ-Glu)₂-CO—(CH₂)₁₆—CO₂H)AQ- | | |
| | Aib-AFIEYLLE-Aib-GPSSGAPPPSGT-NH₂ | | |
| 279 | Y-Aib-QGTFTSDFS-Orn-αMeL-LDKK((2-[2-(2-Amino- | 285 | 5050.7 |
| | ethoxy)-ethoxy]-acetyl)-(γ-Glu)₂-CO—(CH₂)₁₆—CO₂H)AQ- | | |
| | Aib-AFIEYLLE-Aib-GPSSGAPPPSG-4Pal-NH₂ | | |
| 280 | Y-Aib-QGTFTSD-4Pal-SK-αMeL-LDKK((2-[2-(2-Amino- | 286 | 4907.5 |
| | ethoxy)-ethoxy]-acetyl)-(γ-Glu)-CO—(CH₂)₁₆—CO₂H)AQ- | | |
| | Aib-AFIEYLIE-Aib-GESSGAPPPSGS-NH₂ | | |
| 281 | Y-Aib-QGTFTSD-4Pal-SK-αMeL-LDKK((2-[2-(2-Amino- | 287 | 5007.6 |
| | ethoxy)-ethoxy]-acetyl)-(γ-Glu)-CO—(CH₂)₁₆—CO₂H)AQ- | | |
| | Aib-AFIEYLIE-Aib-GESSGEPPPSGE-NH₂ | | |
| 282 | Y-Aib-QGTFTSD-4Pal-SK-αMeL-LDKK((2-[2-(2-Amino- | 288 | 4965.5 |
| | ethoxy)-ethoxy]-acetyl)-(γ-Glu)-CO—(CH₂)₁₆—CO₂H)AQ- | | |
| | Aib-AFIEYLIE-Aib-GESSGEPPPSGS-NH₂ | | |
| 283 | Y-Aib-QGTFTSD-4Pal-SK-αMeL-LDKK((2-[2-(2-Amino- | 289 | 4893.5 |
| | ethoxy)-ethoxy]-acetyl)-(γ-Glu)-CO—(CH₂)₁₆—CO₂H)AQ- | | |
| | Aib-AFIEYLIEaGESSGAPPPSGS-NH₂ | | |
| 284 | Y-Aib-QGTFTSD-4Pal-SK-αMeL-LDKK((2-[2-(2-Amino- | 290 | 4951.5 |
| | ethoxy)-ethoxy]-acetyl)-(γ-Glu)-CO—(CH₂)₁₆—CO₂H)AQ- | | |
| | Aib-AFIEYLIEaGESSGEPPPSGS-NH₂ | | |
| 285 | Y-Aib-QGTFTSD-4Pal-SK-αMeL-LDKK((2-[2-(2-Amino- | 291 | 4849.4 |
| | ethoxy)-ethoxy]-acetyl)-(γ-Glu)-CO—(CH₂)₁₆—CO₂H)AQ- | | |
| | Aib-AFIEYLIA-Aib-GESSGAPPPSGS-NH₂ | | |
| 286 | Y-Aib-QGTFTSD-4Pal-SK-αMeL-LDKK((2-[2-(2-Amino- | 292 | 4949.5 |
| | ethoxy)-ethoxy]-acetyl)-(γ-Glu)-CO—(CH₂)₁₆—CO₂H)AQ- | | |
| | Aib-AFIEYLIA-Aib-GESSGEPPPSGE-NH₂ | | |
| 287 | Y-Aib-QGTFTSD-4Pal-SK-αMeL-LDKK((2-[2-(2-Amino- | 293 | 4907.5 |
| | ethoxy)-ethoxy]-acetyl)-(γ-Glu)-CO—(CH₂)₁₆—CO₂H)AQ- | | |
| | Aib-AFIEYLIA-Aib-GESSGEPPPSGS-NH₂ | | |
| 288 | Y-Aib-QGTFTSDFSI-αMeL-LDKK((2-[2-(2-Amino- | 294 | 4959.6 |
| | ethoxy)-ethoxy]-acetyl)-(γ-Glu)-CO—(CH₂)₁₈—CO₂H)AQ- | | |
| | Aib-AFIEYLLEGGPSSGEPPPSEG-NH₂ | | |
| 289 | Y-Aib-QGTFTSDYSI-αMeL-LDKK((2-[2-(2-Amino- | 295 | 5046.6 |
| | ethoxy)-ethoxy]-acetyl)-(γ-Glu)-CO—(CH₂)₁₈— | | |
| | CO₂H)AQRAFIEYLLEGGPSSGEPPPSEG-NH₂ | | |
| 290 | H-Aib-QGT-αMeF(2F)-TSDYSILLDKK((2-[2-(2-Amino- | 296 | 4954.5 |
| | ethoxy)-ethoxy]-acetyl)-(γ-Glu)-CO—(CH₂)₁₈—CO₂H)AA- | | |
| | Aib-AFIEYLIETGPSSGEPPPSEG-NH₂ | | |
| 291 | H-Aib-QGT-αMeF(2F)-TSDYSI-αMeL-LDKK((2-[2-(2- | 297 | 4926.5 |
| | Amino-ethoxy)-ethoxy]-acetyl)-(γ-Glu)-CO—(CH₂)₁₆- | | |
| | CO₂H)AA-Aib-AFIEYLIETGPSSGEPPPSEG-NH₂ | | |
| 292 | Y-Aib-QGT-αMeF(2F)-TSDYSK-αMeL-LDKK((2-[2-(2- | 298 | 5053.5 |
| | Amino-ethoxy)-ethoxy]-acetyl)-(γ-Glu)-CO—(CH₂)₁₆- | | |
| | CO₂H)AQ-Aib-QFIEYLEEGGPSSGEPPPSEG-NH₂ | | |
| 293 | Y-Aib-QGT-αMeF(2F)-TSDYSILLDKIAQK((2-[2-(2- | 299 | 5021.6 |
| | Amino-ethoxy)-ethoxy]-acetyl)-(γ-Glu)-CO—(CH₂)₁₈— | | |
| | CO₂H)AFIEYLLEGGPSSGEPPPSEG-NH₂ | | |
| 294 | Y-Aib-QGTFTSDYSI-αMeL-LDKK((2-[2-(2-Amino- | 300 | 5063.7 |
| | ethoxy)-ethoxy]-acetyl)₂-(γ-Glu)-CO—(CH₂)₁₈—CO₂H)AA- | | |
| | Aib-AFIEYLLEGGPSSGEPPPSEG-NH₂ | | |
| 295 | Y-Aib-QGT-αMeF(2F)-TSDYSKLLDKIAQK((2-[2-(2- | 301 | 5036.6 |
| | Amino-ethoxy)-ethoxy]-acetyl)-(γ-Glu)-CO—(CH₂)₁₈— | | |
| | CO₂H)AFIEYLLEGGPSSGEPPPSEG-NH₂ | | |
| 296 | Y-Aib-QGT-αMeF(2F)-TSDYSILLDKIAAK((2-[2-(2- | 302 | 4964.5 |
| | Amino-ethoxy)-ethoxy]-acetyl)-(γ-Glu)-CO—(CH₂)₁₈— | | |
| | CO₂H)AFIEYLIEGGPSSGEPPPSEG-NH₂ | | |
| 297 | NMeY-Aib-QGT-αMeF-TSDYSSLLDKIAAK((2-[2-(2- | 303 | 5079.7 |
| | Amino-ethoxy)-ethoxy]-acetyl)₂-(γ-Glu)-CO—(CH₂)₁₈— | | |
| | CO₂H)AFIEYLLEGGPSSGEPPPSEG-NH₂ | | |
| 298 | H-Aib-QGT-αMeF(2F)-TSDYSILLDKK((2-[2-(2-Amino- | 304 | 4924.5 |
| | ethoxy)-ethoxy]-acetyl)-(γ-Glu)-CO—(CH₂)₁₈—CO₂H)AA- | | |
| | Aib-AFIEYLIEAGPSSGEPPPSEG-NH₂ | | |
| 299 | NMeY-Aib-QGT-αMeF-TSDYSILLDKIAAK((2-[2-(2- | 305 | 5105.7 |
| | Amino-ethoxy)-ethoxy]-acetyl)₂-(γ-Glu)-CO—(CH₂)₁₈— | | |
| | CO₂H)AFIEYLIEGGPSSGEPPPSEG-NH₂ | | |
| 300 | NMeY-Aib-QGT-αMeF-TSDYSILLDKIAAK((2-[2-(2- | 306 | 5055.7 |
| | Amino-ethoxy)-ethoxy]-acetyl)₂-(γ-Glu)-CO—(CH₂)₁₈— | | |
| | CO₂H)AFVQWLIAGGPSSGEPPPSEG-NH₂ | | |
| 301 | NMeY-Aib-QGT-αMeF-TSDYSILLDKQAAK((2-[2-(2- | 307 | 5070.7 |
| | Amino-ethoxy)-ethoxy]-acetyl)₂-(γ-Glu)-CO—(CH₂)₁₈— | | |
| | CO₂H)AFVQWLIAGGPSSGEPPPSEG-NH₂ | | |
| 302 | NMeY-Aib-QGT-αMeF-TSDYSILLDKQAAK((2-[2-(2- | 308 | 5128.7 |
| | Amino-ethoxy)-ethoxy]-acetyl)₂-(γ-Glu)-CO—(CH₂)₁₈— | | |
| | CO₂H)AFVQWLIEGGPSSGEPPPSEG-NH₂ | | |
| 303 | Y-Aib-QGT-αMeF(2F)-TSDYSKLLDEIAQK((2-[2-(2- | 309 | 5037.6 |
| | Amino-ethoxy)-ethoxy]-acetyl)-(γ-Glu)-CO—(CH₂)₁₈— | | |
| | CO₂H)AFIEYLLEGGPSSGEPPPSEG-NH₂ | | |
| 304 | Y-Aib-QGT-αMeF(2F)-TSDYSKLLDKIAQK((2-[2-(2- | 310 | 5036.6 |
| | Amino-ethoxy)-ethoxy]-acetyl)-(γ-Glu)-CO—(CH₂)₁₈— | | |
| | CO₂H)AFIEYLIEGGPSSGEPPPSEG-NH₂ | | |
| 305 | Y-Aib-QGTFTSDYSI-αMeL-LDKQAAK((2-[2-(2-Amino- | 311 | 5057.7 |
| | ethoxy)-ethoxy]-acetyl)₂-(γ-Glu)-CO—(CH₂)₁₈— | | |
| | CO₂H)AFVEWLLAGGPSSGEPPPSEG-NH₂ | | |
| 306 | Y-Aib-QGT-αMeF(2F)-TSDYSILLDKAAQK((2-[2-(2- | 312 | 5022.6 |
| | Amino-ethoxy)-ethoxy]-acetyl)-(γ-Glu)-CO—(CH₂)₁₈—CO₂H)- | | |
| | Orn-FIEYLIEGGPSSGEPPPSEG-NH₂ | | |
| 307 | Y-Aib-QGT-αMeF-TSDYSILLDKIAAK((2-[2-(2-Amino- | 313 | 5092.7 |
| | ethoxy)-ethoxy]-acetyl)₂-(γ-Glu)-CO—(CH₂)₁₆- | | |
| | CO₂H)NFIEYLVEGGPSSGEPPPSEG-NH₂ | | |
| 308 | Y-Aib-QGTFTSDYSI-αMeL-LDKIAAK((2-[2-(2-Amino- | 314 | 5061.7 |
| | ethoxy)-ethoxy]-acetyl)₂-(γ-Glu)-CO—(CH₂)₁₈—CO₂H)-Orn- | | |
| | FVQYLIAGGPSSGEPPPSEG-NH₂ | | |
| 309 | Y-Aib-QGT-αMeF(2F)-TSDYSKLLDKQAQK((2-[2-(2- | 315 | 5108.6 |
| | Amino-ethoxy)-ethoxy]-acetyl)-(γ-Glu)-CO—(CH₂)₁₈— | | |
| | CO₂H)QFIEYLIEGGPSSGEPPPSEG-NH₂ | | |
| 310 | Y-Aib-QGT-αMeF(2F)-TSDYSKLLDKIAQK((2-[2-(2- | 316 | 5102.7 |
| | Amino-ethoxy)-ethoxy]-acetyl)-(γ-Glu)-CO—(CH₂)₁₈—CO₂H)- | | |
| | Orn-FIEWLIEGGPSSGEPPPSEG-NH₂ | | |
| 311 | Y-Aib-QGT-αMeF(2F)-TSDYSKILDKIAQK((2-[2-(2- | 317 | 5036.6 |
| | Amino-ethoxy)-ethoxy]-acetyl)-(γ-Glu)-CO—(CH₂)₁₈— | | |
| | CO₂H)AFIEYLLEGGPSSGEPPPSEG-NH₂ | | |
| 312 | Y-Aib-QGTFTSDYSI-αMeL-LDKIAAK((2-[2-(2-Amino- | 318 | 5076.7 |
| | ethoxy)-ethoxy]-acetyl)₂-(γ-Glu)-CO—(CH₂)₁₈— | | |
| | CO₂H)QFVEYLIAGGPSSGEPPPSEG-NH₂ | | |
| 313 | Y-Aib-QGTFTSDYSI-αMeL-LDKK((2-[2-(2-Amino- | 319 | 4917.5 |
| | ethoxy)-ethoxy]-acetyl)-(γ-Glu)-CO—(CH₂)₁₈— | | |
| | CO₂H)AQRAFIEYLLEGGPSSGEPPPSG-NH₂ | | |
| 314 | Y-Aib-QGTFTSDYSK-αMeL-LDKK((2-[2-(2-Amino- | 320 | 5055.6 |
| | ethoxy)-ethoxy]-acetyl)-(γ-Glu)-CO—(CH₂)₁₈— | | |
| | CO₂H)AQQAFIQWLIEGGPSSGEPPPSEG-NH₂ | | |
| 315 | Y-Aib-QGTFTSDYSK-αMeL-LDKK((2-[2-(2-Amino- | 321 | 5041.6 |
| | ethoxy)-ethoxy]-acetyl)-(γ-Glu)-CO—(CH₂)₁₈— | | |
| | CO₂H)AQQAFVQWLIEGGPSSGEPPPSEG-NH₂ | | |
| 316 | Y-Aib-QGTFTSDYSKLLDKK((2-[2-(2-Amino-ethoxy)- | 322 | 5012.6 |
| | ethoxy]-acetyl)-(γ-Glu)-CO—(CH₂)₁₈—CO₂H)AQ-Aib- | | |
| | AFVQWLIEGGPSSGEPPPSEG-NH₂ | | |
| 317 | Y-Aib-QGTFTSDYSI-αMeL-LDKQAAK((2-[2-(2-Amino- | 323 | 5085.7 |
| | ethoxy)-ethoxy]-acetyl)₂-(γ-Glu)-CO—(CH₂)₁₈— | | |
| | CO₂H)AFVEWLLA-Aib-GPSSGEPPPSEG-NH₂ | | |
| 318 | Y-Aib-QGTFTSDYSI-αMeL-LDKQAAK((2-[2-(2-Amino- | 324 | 5156.7 |
| | ethoxy)-ethoxy]-acetyl)₂-(γ-Glu)-CO—(CH₂)₁₈— | | |
| | CO₂H)QFIEWLIEGGPSSGEPPPGEG-NH₂ | | |
| 319 | Y-Aib-QGTFTSDYSI-αMeL-LDKQAAK((2-[2-(2-Amino- | 325 | 5170.8 |
| | ethoxy)-ethoxy]-acetyl)₂-(γ-Glu)-CO—(CH₂)₁₈— | | |
| | CO₂H)QFIEWLIEGGPSSGEPPPGAE-NH₂ | | |
| 320 | Y-Aib-QGTFTSDYSI-αMeL-LDKQAAK((2-[2-(2-Amino- | 326 | 5084.7 |
| | ethoxy)-ethoxy]-acetyl)₂-(γ-Glu)-CO—(CH₂)₁₈— | | |
| | CO₂H)QFVEWLLAGGPSSGEPPPGEG-NH₂ | | |
| 321 | Y-Aib-QGT-αMeF(2F)-TSD-F(4CN)-SILLDKQAQK((2-[2- | 327 | 5190.7 |
| | (2-Amino-ethoxy)-ethoxy]-acetyl)₂-(γ-Glu)-CO—(CH₂)₁₈— | | |
| | CO₂H)AFIEYLLEGGPSSGEPPPSEG-NH₂ | | |
| 322 | Y-Aib-QGTFTSDYSK-αMeL-LDKK((2-[2-(2-Amino- | 328 | 4947.5 |
| | ethoxy)-ethoxy]-acetyl)-(γ-Glu)-CO—(CH₂)₁₈— | | |
| | CO₂H)AQQAFIEYLIAGGPSSGAPPPSSE-NH₂ | | |
| 323 | Y-Aib-QGTFTSDYSI-αMeL-LDKIAAK((2-[2-(2-Amino- | 329 | 5184.8 |
| | ethoxy)-ethoxy]-acetyl)₂-(γ-Glu)-CO—(CH₂)₁₈— | | |
| | CO₂H)QFVQWLIE-Aib-GPSSGEPPPSEG-NH₂ | | |
| 324 | Y-Aib-QGTFTSDYSI-αMeL-LDKIAAK((2-[2-(2-Amino- | 330 | 5127.8 |
| | ethoxy)-ethoxy]-acetyl)₂-(γ-Glu)-CO—(CH₂)₁₈— | | |
| | CO₂H)QFVEWLLA-Aib-GPSSGEPPPSEG-NH₂ | | |
| 325 | Y-Aib-QGTFTSDYSI-αMeL-LDKQAAK((2-[2-(2-Amino- | 331 | 5127.8 |
| | ethoxy)-ethoxy]-acetyl)₂-(γ-Glu)-CO—(CH₂)₁₈— | | |
| | CO₂H)QFVNWLLA-Aib-GPSSGEPPPSEG-NH₂ | | |
| 326 | Y-Aib-QGTFTSDYSI-αMeL-LDKQAAK((2-[2-(2-Amino- | 332 | 5142.8 |
| | ethoxy)-ethoxy]-acetyl)₂-(γ-Glu)-CO—(CH₂)₁₈— | | |
| | CO₂H)QFVEWLIA-Aib-GPSSGEPPPSEG-NH₂ | | |
| 327 | Y-Aib-QGTFTSDYSI-αMeL-LDKQAAK((2-[2-(2-Amino- | 333 | 5084.7 |
| | ethoxy)-ethoxy]-acetyl)₂-(γ-Glu)-CO—(CH₂)₁₈— | | |
| | CO₂H)QFVEWLLA-Aib-GPSSGAPPPSEG-NH₂ | | |
| 328 | Y-Aib-QGTFTSDYSI-αMeL-LD-Orn-QAAK((2-[2-(2- | 334 | 5128.7 |
| | Amino-ethoxy)-ethoxy]-acetyl)₂-(γ-Glu)-CO—(CH₂)₁₈— | | |
| | CO₂H)QFVEWLLA-Aib-GPSSGEPPPSEG-NH₂ | | |
| 329 | Y-Aib-QGTFTSDYSI-αMeL-LDKQAAK((ε-K)₂-(γ-Glu)- | 335 | 5108.8 |
| | CO—(CH₂)₁₈—CO₂H)QFVEWLLA-Aib-GPSSGEPPPSEG | | |
| 330 | Y-Aib-QGT-αMeF(2F)-TSDYSKLLDKIAQK((2-[2-(2- | 336 | 5008.6 |
| | Amino-ethoxy)-ethoxy]-acetyl)-(γ-Glu)-CO—(CH₂)₁₆- | | |
| | CO₂H)AFIEYLIEGGPSSGEPPPSEG-NH₂ | | |
| 331 | Y-Aib-QGT-αMeF(2F)-TSDYSILLDKQAAK((2-[2-(2- | 337 | 5009.5 |
| | Amino-ethoxy)-ethoxy]-acetyl)-(γ-Glu)-CO—(CH₂)₁₆- | | |
| | CO₂H)AFIEYLIEGGPSSGEPPPSEG-NH₂ | | |
| 332 | Y-Aib-QGTFTSDYSI-αMeL-LDKQAAK((2-[2-(2-Amino- | 338 | 5098.7 |
| | ethoxy)-ethoxy]-acetyl)₂-(γ-Glu)-CO—(CH₂)₁₈— | | |
| | CO₂H)QFVEWLIAGGPSSGEPPPAEG-NH₂ | | |
| 333 | Y-Aib-QGTFTSDYSI-αMeL-LDKQAAK((2-[2-(2-Amino- | 339 | 5112.7 |
| | ethoxy)-ethoxy]-acetyl)₂-(γ-Glu)-CO—(CH₂)₁₈— | | |
| | CO₂H)QFVEWLIA-Aib-GPSSGEPPPGEG-NH₂ | | |
| 334 | Y-Aib-QGTFTSDYSI-αMeL-LDKQAAK((2-[2-(2-Amino- | 340 | 5126.8 |
| | ethoxy)-ethoxy]-acetyl)₂-(γ-Glu)-CO—(CH₂)₁₈— | | |
| | CO₂H)QFVEWLIA-Aib-GPSSGEPPPAEG-NH₂ | | |
| 335 | Y-Aib-QGTFTSDYSI-αMeL-LDKQAAK((2-[2-(2-Amino- | 341 | 5070.7 |
| | ethoxy)-ethoxy]-acetyl)₂-(γ-Glu)-CO—(CH₂)₁₈— | | |
| | CO₂H)QFVEWLIA-Aib-GPSSGEPPPGSG-NH₂ | | |
| 336 | Y-Aib-QGTFTSDYSI-αMeL-LDKQAAK((2-[2-(2-Amino- | 342 | 5084.7 |
| | ethoxy)-ethoxy]-acetyl)₂-(γ-Glu)-CO—(CH₂)₁₈— | | |
| | CO₂H)QFVEWLIA-Aib-GPSSGEPPPGTG-NH₂ | | |
| 337 | Y-Aib-QGTFTSDYSK-αMeL-LDKK((2-[2-(2-Amino- | 343 | 4961.5 |
| | ethoxy)-ethoxy]-acetyl)-(γ-Glu)-CO—(CH₂)₁₈— | | |
| | CO₂H)AQQAFIEYLIAGGPSSGEPPPSGD-NH₂ | | |
| 338 | Y-Aib-QGT-αMeF(2F)-TSDYSKLLDKIAQK((2-[2-(2- | 344 | 5035.6 |
| | Amino-ethoxy)-ethoxy]-acetyl)-(γ-Glu)-CO—(CH₂)₁₈— | | |
| | CO₂H)AFIQYLIEGGPSSGEPPPSEG-NH₂ | | |
| 339 | Y-Aib-QGT-αMeF(2F)-TSDYSKLLDKIAQK((2-[2-(2- | 345 | 4978.6 |
| | Amino-ethoxy)-ethoxy]-acetyl)-(γ-Glu)-CO—(CH₂)₁₈— | | |
| | CO₂H)AFIEYLIEGGPSSGAPPPSEG-NH₂ | | |
| 340 | Y-Aib-QGT-αMeF(2F)-TSDYSILLDKQAAK((2-[2-(2- | 346 | 4979.5 |
| | Amino-ethoxy)-ethoxy]-acetyl)-(γ-Glu)-CO—(CH₂)₁₈— | | |
| | CO₂H)EFIEYLIEGGPSSGAPPPSEG-NH₂ | | |
| 341 | Y-Aib-QGT-αMeF(2F)-TSD-F(4CN)-SILLDKQAQK((2-[2- | 347 | 5044.6 |
| | (2-Amino-ethoxy)-ethoxy]-acetyl)-(γ-Glu)-CO—(CH₂)₁₈— | | |
| | CO₂H)AFIQYLLEGGPSSGEPPPSEG-NH₂ | | |
| 342 | Y-Aib-QGTFTSDYSK-αMeL-LDKK((2-[2-(2-Amino- | 348 | 5055.6 |
| | ethoxy)-ethoxy]-acetyl)-(γ-Glu)-CO—(CH₂)₁₈— | | |
| | CO₂H)AQQAFVQWLIEaGPSSGEPPPSEG-NH₂ | | |
| 343 | Y-Aib-QGTFTSDYSK-αMeL-LDKK((2-[2-(2-Amino- | 349 | 4998.6 |
| | ethoxy)-ethoxy]-acetyl)-(γ-Glu)-CO—(CH₂)₁₈—CO₂H)AQ- | | |
| | Aib-AFVQWLLEGGPSSGEPPPSEG-NH₂ | | |
| 344 | Y-Aib-QGTFTSDYSK-αMeL-LDKK((2-[2-(2-Amino- | 350 | 4975.6 |
| | ethoxy)-ethoxy]-acetyl)-(γ-Glu)-CO—(CH₂)₁₈— | | |
| | CO₂H)AQQAFIEYLLAGGPSSGEPPPSGE-NH₂ | | |
| 345 | Y-Aib-QGT-αMeF(2F)-TSDYSILLDKQAQK((2-[2-(2- | 351 | 5181.7 |
| | Amino-ethoxy)-ethoxy]-acetyl)₂-(γ-Glu)-CO—(CH₂)₁₈— | | |
| | CO₂H)AFIEYLLEGGPSSGEPPPSEG-NH₂ | | |
| 346 | Y-Aib-QGT-αMeF(2F)-TSDFSILLDKQAQK((2-[2-(2- | 352 | 5165.7 |
| | Amino-ethoxy)-ethoxy]-acetyl)₂-(γ-Glu)-CO—(CH₂)₁₈— | | |
| | CO₂H)AFIEYLLEGGPSSGEPPPSEG-NH₂ | | |
| 347 | Y-Aib-QGT-αMeF(2F)-TSD-4Pal-SILLDKQAQK((2-[2-(2- | 353 | 5166.7 |
| | Amino-ethoxy)-ethoxy]-acetyl)₂-(γ-Glu)-CO—(CH₂)₁₈— | | |
| | CO₂H)AFIEYLLEGGPSSGEPPPSEG-NH₂ | | |
| 348 | Y-Aib-QGT-αMeF(2F)-TSDYSILLDKQAAK((2-[2-(2- | 354 | 5182.7 |
| | Amino-ethoxy)-ethoxy]-acetyl)₂-(γ-Glu)-CO—(CH₂)₁₈— | | |
| | CO₂H)EFIEYLIEGGPSSGEPPPSEG-NH₂ | | |
| 349 | Y-Aib-QGTFTSDYSI-αMeL-LDKQAAK((2-[2-(2-Amino- | 355 | 5133.8 |
| | ethoxy)-ethoxy]-acetyl)₂-(γ-Glu)-CO—(CH₂)₁₈— | | |
| | CO₂H)QFIEYLIA-Aib-GPSSGEPPPSEG-NH₂ | | |
| 350 | Y-Aib-QGT-αMeF(2F)-TSD-F(4CN)-SILLDKQAQK((2-[2- | 356 | 5132.7 |
| | (2-Amino-ethoxy)-ethoxy]-acetyl)₂-(γ-Glu)-CO—(CH₂)₁₈— | | |
| | CO₂H)AFIEYLLEGGPSSGEPPPSAG-NH₂ | | |
| 351 | Y-Aib-QGT-αMeF(2F)-TSDYSILLDAQAAK((2-[2-(2- | 357 | 4980.5 |
| | Amino-ethoxy)-ethoxy]-acetyl)-(γ-Glu)-CO—(CH₂)₁₈— | | |
| | CO₂H)EFIEYLIEGGPSSGEPPPSEG-NH₂ | | |
| 352 | Y-Aib-QGT-αMeF(2F)-TSD-F(4CN)-SILLDKQAQK((2-[2- | 358 | 5174.7 |
| | (2-Amino-ethoxy)-ethoxy]-acetyl)-(γ-Glu)₂-CO—(CH₂)₁₈— | | |
| | CO₂H)AFIEYLLEGGPSSGEPPPSEG-NH₂ | | |
| 353 | Y-Aib-QGT-αMeF(2F)-TSD-F(4CN)-SILLDKQAQK((2-[2- | 359 | 5189.8 |
| | (2-Amino-ethoxy)-ethoxy]-acetyl)₂-(γ-Glu)-CO—(CH₂)₁₈— | | |
| | CO₂H)AFIQYLLEGGPSSGEPPPSEG-NH₂ | | |
| 354 | Y-Aib-QGT-αMeF(2F)-TSDYSKILDKIAQK((2-[2-(2- | 360 | 5035.6 |
| | Amino-ethoxy)-ethoxy]-acetyl)-(γ-Glu)-CO—(CH₂)₁₈— | | |
| | CO₂H)AFIQYLIEGGPSSGEPPPSEG-NH₂ | | |
| 355 | Y-Aib-QGT-αMeF(2F)-TSDYSKILDKIAQK((2-[2-(2- | 361 | 5036.6 |
| | Amino-ethoxy)-ethoxy]-acetyl)-(γ-Glu)-CO—(CH₂)₁₈— | | |
| | CO₂H)AFIEYLIEGGPSSGAPPPSEG-NH₂ | | |
| 356 | Y-Aib-QGT-αMeF(2F)-TSDYSKLLDKIAQK((2-[2-(2- | 362 | 4978.6 |
| | Amino-ethoxy)-ethoxy]-acetyl)-(γ-Glu)-CO—(CH₂)₁₈— | | |
| | CO₂H)AFIEYLIEGGPSSGAPPPSGE-NH₂ | | |
| 357 | Y-Aib-QGT-αMeF(2F)-TSDYSKLLDKIAQK((2-[2-(2- | 363 | 5020.6 |
| | Amino-ethoxy)-ethoxy]-acetyl)-(γ-Glu)-CO—(CH₂)₁₈— | | |
| | CO₂H)AFIEYLIEGGPSSGAPPPEGE-NH₂ | | |
| 358 | Y-Aib-QGTFTSDYSK-αMeL-LDKK((2-[2-(2-Amino- | 364 | 4894.4 |
| | ethoxy)-ethoxy]-acetyl)-(γ-Glu)-CO—(CH₂)₁₆—CO₂H)AQ- | | |
| | Aib-AFIEYLLEGGESSGAPPPSGS-NH₂ | | |
| 359 | Y-Aib-QGTFTSDYS-Orn-αMeL-LDKK((2-[2-(2-Amino- | 365 | 4880.4 |
| | ethoxy)-ethoxy]-acetyl)-(γ-Glu)-CO—(CH₂)₁₆—CO₂H)AQ- | | |
| | Aib-AFIEYLLEGGESSGAPPPSGS-NH₂ | | |
| 360 | Y-Aib-QGTFTSDYS-Dap-αMeL-LDKK((2-[2-(2-Amino- | 366 | 4852.4 |
| | ethoxy)-ethoxy]-acetyl)-(γ-Glu)-CO—(CH₂)₁₆—CO₂H)AQ- | | |
| | Aib-AFIEYLLEGGESSGAPPPSGS-NH₂ | | |
| 361 | Y-Aib-QGTFTSDYSR-αMeL-LDKK((2-[2-(2-Amino- | 367 | 4922.5 |
| | ethoxy)-ethoxy]-acetyl)-(γ-Glu)-CO—(CH₂)₁₆—CO₂H)AQ- | | |
| | Aib-AFIEYLLEGGESSGAPPPSGS-NH₂ | | |
| 362 | Y-Aib-QGTFTSDYSQ-αMeL-LDKK((2-[2-(2-Amino- | 368 | 4894.4 |
| | ethoxy)-ethoxy]-acetyl)-(γ-Glu)-CO—(CH₂)₁₆—CO₂H)AQ- | | |
| | Aib-AFIEYLLEGGESSGAPPPSGS-NH₂ | | |
| 363 | Y-Aib-QGT-αMeF(2F)-TSD-F(4CN)-SKLLDKIAQK((2-[2- | 369 | 4945.5 |
| | (2-Amino-ethoxy)-ethoxy]-acetyl)-(γ-Glu)-CO—(CH₂)₁₈— | | |
| | CO₂H)AFIEYLIEGGPSSGAPPPSGS-NH₂ | | |
| 364 | Y-Aib-QGT-αMeF(2F)-TSD-F(4CN)-SKLLDKIAQK((2-[2- | 370 | 5003.6 |
| | (2-Amino-ethoxy)-ethoxy]-acetyl)-(γ-Glu)-CO—(CH₂)₁₈— | | |
| | CO₂H)AFIEYLIEGGPSSGEPPPSGS-NH₂ | | |
| 365 | Y-Aib-QGT-αMeF(2F)-TSD-4Pal-SI-αMeL-LD-Orn-K((2- | 371 | 4849.5 |
| | [2-(2-Amino-ethoxy)-ethoxy]-acetyl)-(γ-Glu)-CO—(CH₂)₁₈— | | |
| | CO₂H)AQ-Aib-Orn-FIe-αMeY-LLEGGPSSGEPPPS | | |
| 366 | Y-Aib-QGT-αMeF(2F)-TSD-4Pal-SI-αMeL-LD-Orn-K((2- | 372 | 4820.4 |
| | [2-(2-Amino-ethoxy)-ethoxy]-acetyl)-(γ-Glu)-CO—(CH₂)₁₈— | | |
| | CO₂H)AQ-Aib-Aib-FIe-αMeY-LLEGGPSSGEPPPS | | |
| 367 | Y-Aib-QGT-αMeF(2F)-TSD-4Pal-SI-αMeL-LD-Orn-K((2- | 373 | 4821.4 |
| | [2-(2-Amino-ethoxy)-ethoxy]-acetyl)-(γ-Glu)-CO—(CH₂)₁₆- | | |
| | CO₂H)AQ-Aib-Orn-FIe-αMeY-LLEGGPSSGEPPPS | | |
| 368 | Y-Aib-QGT-αMeF(2F)-TSDY-αMeS-I-αMeL-LD-Orn- | 374 | 4850.4 |
| | K((2-[2-(2-Amino-ethoxy)-ethoxy]-acetyl)-(γ-Glu)-CO— | | |
| | (CH₂)₁₆—CO₂H)AQ-Aib-Orn-FIe-αMeY- | | |
| | LLEGGPSSGEPPPS-NH₂ | | |
| 369 | Y-Aib-QGT-αMeF(2F)-TSD-4Pal-αMeS-I-αMeL-LD-Orn- | 375 | 4835.4 |
| | K((2-[2-(2-Amino-ethoxy)-ethoxy]-acetyl)-(γ-Glu)-CO— | | |
| | (CH₂)₁₆—CO₂H)AQ-Aib-Orn-FIe-αMeY- | | |
| | LLEGGPSSGEPPPS-NH₂ | | |
| 370 | Y-Aib-QGT-αMeF(2F)-TSD-4Pal-SI-αMeL-LD-Orn-K((2- | 376 | 4863.4 |
| | [2-(2-Amino-ethoxy)-ethoxy]-acetyl)-(γ-Glu)-CO—(CH₂)₁₆- | | |
| | CO₂H)AQ-Aib-Orn-FIe-αMeY-LLEGGPSSGEPPPE-NH₂ | | |
| 371 | Y-Aib-QGT-αMeF(2F)-TSD-4Pal-SI-αMeL-LD-Orn-K((γ- | 377 | 4805.4 |
| | Glu)₂-CO—(CH₂)₁₆—CO₂H)AQ-Aib-Orn-FIe-αMeY- | | |
| | LLEGGPSSGEPPPS-NH₂ | | |
| 372 | Y-Aib-QGT-αMeF(2F)-TSD-4Pal-SI-αMeL-LD-Orn-K((γ- | 378 | 4847.4 |
| | Glu)₂-CO—(CH₂)₁₆—CO₂H)AQ-Aib-Orn-FIe-αMeY- | | |
| | LLEGGPSSGEPPPE-NH₂ | | |
| 373 | Y-Aib-QGT-αMeF(2F)-TSD-4Pal-SI-αMeL-LD-Orn-K((γ- | 379 | 4875.5 |
| | Glu)₂-CO—(CH₂)₁₆—CO₂H)AQ-Aib-Orn-FIe-αMeY- | | |
| | LLEGGPSS-Aib-EPPPE-NH₂ | | |
| 374 | Y-Aib-QGT-αMeF(2F)-TSD-4Pal-αMeS-I-αMeL-LD-Orn- | 380 | 4819.4 |
| | K((γ-Glu)₂-CO—(CH₂)₁₆—CO₂H)AQ-Aib-Orn-FIe-αMeY- | | |
| | LLEGGPSSGEPPPS-NH₂ | | |
| 375 | Y-Aib-QGT-αMeF(2F)-TSD-4Pal-αMeS-I-αMeL-LD-Orn- | 381 | 4819.4 |
| | K((γ-Glu)₂-CO—(CH₂)₁₆—CO₂H)AQ-Aib-Orn-FIe-αMeY- | | |
| | LIEGGPSSGEPPPS-NH₂ | | |
| 376 | Y-Aib-QGT-αMeF(2F)-TSD-4Pal-αMeS-I-αMeL-LD-Orn- | 382 | 4964.5 |
| | K((2-[2-(2-Amino-ethoxy)-ethoxy]-acetyl)-(γ-Glu)₂-CO— | | |
| | (CH₂)₁₆—CO₂H)AQ-Aib-Orn-FIe-αMeY- | | |
| | LLEGGPSSGEPPPS-NH₂ | | |
| 377 | Y-Aib-QGT-αMeF(2F)-TSD-4Pal-αMeS-I-αMeL-LD-Orn- | 383 | 4877.5 |
| | K((2-[2-(2-Amino-ethoxy)-ethoxy]-acetyl)-(γ-Glu)-CO— | | |
| | (CH₂)₁₆—CO₂H)AQ-Aib-Orn-FIe-αMeY- | | |
| | LLEGGPSSGEPPPE-NH₂ | | |
| 378 | Y-Aib-QGT-αMeF(2F)-TSD-4Pal-αMeS-I-αMeL-LD-Orn- | 384 | 4877.5 |
| | K((2-[2-(2-Amino-ethoxy)-ethoxy]-acetyl)-(γ-Glu)-CO— | | |
| | (CH₂)₁₆—CO₂H)AQ-Aib-Orn-FIe-αMeY- | | |
| | LIEGGPSSGEPPPE-NH₂ | | |
| 379 | H-Aib-QGT-αMeF(2F)-TSD-4Pal-αMeS-I-αMeL-LD-Orn- | 385 | 4905.5 |
| | K((2-[2-(2-Amino-ethoxy)-ethoxy]-acetyl)-(γ-Glu)-CO— | | |
| | (CH₂)₁₆—CO₂H)AQ-Aib-Orn-FIe-αMeY- | | |
| | LLEGGPSSGEPPPE-NH₂ | | |
| 380 | Y-Aib-QGT-αMeF(2F)-TSD-4Pal-αMeS-I-αMeL-LD-Orn- | 386 | 4851.4 |
| | K((2-[2-(2-Amino-ethoxy)-ethoxy]-acetyl)-(γ-Glu)-CO— | | |
| | (CH₂)₁₆—CO₂H)AQ-Aib-Orn-FIe-αMeY-LLEGGPSS-Aib- | | |
| | EPPPE-NH₂ | | |
| 381 | H-Aib-QGT-αMeF(2F)-TSDY-αMeS-I-αMeL-LD-Orn- | 387 | 4809.4 |
| | K((2-[2-(2-Amino-ethoxy)-ethoxy]-acetyl)-(γ-Glu)-CO— | | |
| | (CH₂)₁₆—CO₂H)AQ-Aib-AFIeYLLEGGPSSGEPPPE-NH₂ | | |
| 382 | Y-Aib-QGTFTSDY-αMeS-I-αMeL-LDKK((2-[2-(2-Amino- | 388 | 4890.5 |
| | ethoxy)-ethoxy]-acetyl)₂-(γ-Glu)-CO—(CH₂)₁₈—CO₂H)AQ- | | |
| | Aib-AFIEYLIEGGPSSGAPPPS-NH₂ | | |
| 383 | Y-Aib-QGT-αMeF(2F)-TSDYSI-αMeL-LDKK((2-[2-(2- | 389 | 5067.7 |
| | Amino-ethoxy)-ethoxy]-acetyl)₂-(γ-Glu)-CO—(CH₂)₁₈— | | |
| | CO₂H)AA-Aib-AFIEYLIETGPSSGAPPPSEG-NH₂ | | |
| 384 | Y-Aib-QGT-αMeF(2F)-TSDY-αMeS-I-αMeL-LD-Orn- | 390 | 4906.5 |
| | K((2-[2-(2-Amino-ethoxy)-ethoxy]-acetyl)-(γ-Glu)-CO— | | |
| | (CH₂)₁₆—CO₂H)AQ-Aib-Orn-FIEYLLEGGPSSGAPPPS | | |
| 385 | Y-Aib-QGT-αMeF(2F)-TSDYSILLDKK((2-[2-(2-Amino- | 391 | 4894.5 |
| | ethoxy)-ethoxy]-acetyl)₂-(γ-Glu)-CO—(CH₂)₁₈—CO₂H)AQ- | | |
| | Aib-AFIEYLLEGGPSSGAPPPS-NH₂ | | |
| 386 | Y-Aib-QGT-αMeF(2F)-TSDYSILLDKK((2-[2-(2-Amino- | 392 | 4936.5 |
| | ethoxy)-ethoxy]-acetyl)₂-(γ-Glu)-CO—(CH₂)₁₈—CO₂H)AQ- | | |
| | Aib-AFIEYLLEGGPSSGAPPPE-NH₂ | | |
| 387 | Y-Aib-QGT-αMeF(2F)-TSDYSILLDKK((2-[2-(2-Amino- | 393 | 4737.2 |
| | ethoxy)-ethoxy]-acetyl)-(γ-Glu)-CO—(CH₂)₁₆—CO₂H)AQ- | | |
| | Aib-AFIEYLEEGGPSSGAPPPS-NH₂ | | |
| 388 | Y-Aib-QGT-αMeF(2F)-TSDYSILLDKK((2-[2-(2-Amino- | 394 | 4779.3 |
| | ethoxy)-ethoxy]-acetyl)-(γ-Glu)-CO—(CH₂)₁₆—CO₂H)AQ- | | |
| | Aib-AFIEYLEEGGPSSGAPPPE-NH₂ | | |
| 389 | Y-Aib-QGT-αMeF-TSDY-αMeS-S-αMeL-LD-Orn-K((2-[2- | 395 | 4848.4 |
| | (2-Amino-ethoxy)-ethoxy]-acetyl)-(γ-Glu)-CO—(CH₂)₁₆- | | |
| | CO₂H)AQ-Aib-Orn-FIe-αMeY-LLEGGPSSGEPPPE-NH₂ | | |
| 390 | Y-Aib-QGT-αMeF-TSDY-αMeS-SLLD-Orn-K((2-[2-(2- | 396 | 4834.4 |
| | Amino-ethoxy)-ethoxy]-acetyl)-(γ-Glu)-CO—(CH₂)₁₆- | | |
| | CO₂H)AQ-Aib-Orn-FIe-αMeY-LLEGGPSSGEPPPE-NH₂ | | |
| 391 | Y-Aib-QGT-αMeF-TSDY-αMeS-I-αMeL-LD-Orn-K((2-[2- | 397 | 4860.5 |
| | (2-Amino-ethoxy)-ethoxy]-acetyl)-(γ-Glu)-CO—(CH₂)₁₆- | | |
| | CO₂H)AQ-Aib-Orn-FIeYLLEGGPSSGEPPPE-NH₂ | | |
| 392 | Y-Aib-QGT-αMeF-TSDYSILLDKK((2-[2-(2-Amino- | 398 | 4719.3 |
| | ethoxy)-ethoxy]-acetyl)-(γ-Glu)-CO—(CH₂)₁₆—CO₂H)AQ- | | |
| | Aib-AFIEYLEEGGPSSGAPPPS-NH₂ | | |
| 393 | Y-Aib-QGT-αMeF-TSDY-αMeS-ILLDKK((2-[2-(2-Amino- | 399 | 4733.3 |
| | ethoxy)-ethoxy]-acetyl)-(γ-Glu)-CO—(CH₂)₁₆—CO₂H)AQ- | | |
| | Aib-AFIEYLEEGGPSSGAPPPS-NH₂ | | |
| 394 | Y-Aib-QGT-αMeF-TSDYSI-αMeL-LDKK((2-[2-(2-Amino- | 400 | 4733.3 |
| | ethoxy)-ethoxy]-acetyl)-(γ-Glu)-CO—(CH₂)₁₆—CO₂H)AQ- | | |
| | Aib-AFIEYLEEGGPSSGAPPPS-NH₂ | | |
| 395 | Y-Aib-QGT-αMeF-TSDYSI-αMeL-LDKK((2-[2-(2-Amino- | 401 | 4919.4 |
| | ethoxy)-ethoxy]-acetyl)-(γ-Glu)-CO—(CH₂)₁₆—CO₂H)AQ- | | |
| | Aib-AFIEYLEEGGPSSGAPPPSEG-NH₂ | | |
| 396 | Y-Aib-QGT-αMeF-TSDYSI-αMeL-LDKK((2-[2-(2-Amino- | 402 | 4775.3 |
| | ethoxy)-ethoxy]-acetyl)-(γ-Glu)-CO—(CH₂)₁₆—CO₂H)AQ- | | |
| | Aib-AFIEYLEEGGPSSGAPPPE-NH₂ | | |
| 397 | Y-Aib-QGT-αMeF-TSDYSI-αMeL-LD-Orn-K((2-[2-(2- | 403 | 4761.3 |
| | Amino-ethoxy)-ethoxy]-acetyl)-(γ-Glu)-CO—(CH₂)₁₆- | | |
| | CO₂H)AQ-Aib-AFIEYLEEGGPSSGAPPPE | | |
| 398 | Y-Aib-QGT-αMeF(2F)-TSDYSILLDKK((2-[2-(2-Amino- | 404 | 4923.4 |
| | ethoxy)-ethoxy]-acetyl)-(γ-Glu)-CO—(CH₂)₁₆—CO₂H)AQ- | | |
| | Aib-AFIEYLEEGGPSSGAPPPSEG-NH₂ | | |
| 399 | Y-Aib-QGT-αMeF(2F)-TSDYSILLDKK((2-[2-(2-Amino- | 405 | 4965.4 |
| | ethoxy)-ethoxy]-acetyl)-(γ-Glu)-CO—(CH₂)₁₆—CO₂H)AQ- | | |
| | Aib-AFIEYLEEGGPSSGAPPPEEG-NH₂ | | |
| 400 | Y-Aib-QGT-αMeF(2F)-TSDYSI-αMeL-LDKK((2-[2-(2- | 406 | 4793.3 |
| | Amino-ethoxy)-ethoxy]-acetyl)-(γ-Glu)-CO—(CH₂)₁₆- | | |
| | CO₂H)AQ-Aib-AFIEYLEEGGPSSGAPPPE | | |
| 401 | Y-Aib-QGT-αMeF(2F)-TSD-4Pal-αMeS-I-αMeL-LD-Orn- | 407 | 5021.6 |
| | K((2-[2-(2-Amino-ethoxy)-ethoxy]-acetyl)-(γ-Glu)-CO— | | |
| | (CH₂)₁₆—CO₂H)AQ-Aib-Orn-FIe-αMeY- | | |
| | LIEGGPSSGEPPPSEG-NH₂ | | |
| 402 | Y-Aib-QGT-αMeF(2F)-TSDY-αMeS-I-αMeL-LD-Orn- | 408 | 5053.6 |
| | K((2-[2-(2-Amino-ethoxy)-ethoxy]-acetyl)₂-(γ-Glu)-CO— | | |
| | (CH₂)₁₆—CO₂H)AQ-Aib-Orn-FIe-αMeY- | | |
| | LEEGGPSSGEPPPE-NH₂ | | |
| 403 | Y-Aib-QGT-αMeF(2F)-TSDY-αMeS-I-αMeL-LD-Orn- | 409 | 5094.6 |
| | K((2-[2-(2-Amino-ethoxy)-ethoxy]-acetyl)-(γ-Glu)-CO— | | |
| | (CH₂)₁₆—CO₂H)AQ-Aib-Orn-FIe-αMeY- | | |
| | LEEGGPSSGEPPPEEG-NH₂ | | |
| 404 | Y-Aib-QGT-αMeF(2F)-TSDYSI-αMeL-LD-Orn-K((2-[2-(2- | 410 | 4907.5 |
| | Amino-ethoxy)-ethoxy]-acetyl)-(γ-Glu)-CO—(CH₂)₁₆- | | |
| | CO₂H)AQ-Aib-AFIeYLLEGGPSSGAPPPSEG-NH₂ | | |
| 405 | Y-Aib-QGTFTSDFSK-αMeL-LDKK((ε-K)₂-(γ-Glu)-CO— | 411 | 5027.7 |
| | (CH₂)₁₈—CO₂H)AQ-Aib-AFIEYLAAGGPSSGEPPPSGE- | | |
| | NH₂ | | |
| 406 | Y-Aib-QGT-αMeF(2F)-TSDYSILLDKK((γ-Glu)₂-CO— | 412 | 4721.2 |
| | (CH₂)₁₆—CO₂H)AQ-Aib-AFIEYLEEGGPSSGAPPPS-NH₂ | | |
| 407 | Y-Aib-QGT-αMeF(2F)-TSDYSILLDKK((2-[2-(2-Amino- | 413 | 4795.3 |
| | ethoxy)-ethoxy]-acetyl)-(γ-Glu)-CO—(CH₂)₁₆—CO₂H)AQ- | | |
| | Aib-AFIEYLEEGGPSSGEPPPS-NH₂ | | |
| 408 | Y-Aib-QGT-αMeF(2F)-TSDYSILLDKK((2-[2-(2-Amino- | 414 | 4866.4 |
| | ethoxy)-ethoxy]-acetyl)-(γ-Glu)-CO—(CH₂)₁₆—CO₂H)AQ- | | |
| | Aib-AFIEYLEEGGPSSGAPPPE-NH₂ | | |
| 409 | Y-Aib-QGT-αMeF(2F)-TSDYSSLLDKK((2-[2-(2-Amino- | 415 | 4711.2 |
| | ethoxy)-ethoxy]-acetyl)-(γ-Glu)-CO—(CH₂)₁₆—CO₂H)AQ- | | |
| | Aib-AFIEYLEEGGPSSGAPPPS-NH₂ | | |
| 410 | Y-Aib-QGT-αMeF(2F)-TSDYSILLDAK((2-[2-(2-Amino- | 416 | 4866.3 |
| | ethoxy)-ethoxy]-acetyl)-(γ-Glu)-CO—(CH₂)₁₆- | | |
| | CO₂H)AFIEYLEEGGPSSGAPPPSEG-NH₂ | | |
| 411 | Y-Aib-QGT-αMeF(2F)-TSDYSILLDKK((2-[2-(2-Amino- | 417 | 4908.4 |
| | ethoxy)-ethoxy]-acetyl)-(γ-Glu)-CO—(CH₂)₁₆—CO₂H)AQ- | | |
| | Aib-AFIE-4Pal-LEEGGPSSGAPPPSEG-NH₂ | | |
| 412 | Y-Aib-QGT-αMeF(2F)-TSDYSILLDKK((2-[2-(2-Amino- | 418 | 4907.4 |
| | ethoxy)-ethoxy]-acetyl)-(γ-Glu)-CO—(CH₂)₁₆—CO₂H)AQ- | | |
| | Aib-AFIEFLEEGGPSSGAPPPSEG-NH₂ | | |
| 413 | Y-Aib-QGT-αMeF(2F)-TSD-4Pal-SILLDKK((γ-Glu)₂-CO— | 419 | 4706.2 |
| | (CH₂)₁₆—CO₂H)AQ-Aib-AFIEYLEEGGPSSGAPPPS-NH₂ | | |
| 414 | Y-Aib-QGT-αMeF(2F)-TSDYSILLD-Orn-K((γ-Glu)₂-CO— | 420 | 4707.2 |
| | (CH₂)₁₆—CO₂H)AQ-Aib-AFIEYLEEGGPSSGAPPPS-NH₂ | | |
| 415 | Y-Aib-QGT-αMeF(2F)-TSDYSILLDKK((γ-Glu)₂-CO— | 421 | 4793.3 |
| | (CH₂)₁₆—CO₂H)AQ-Aib-Aad-FIEYLEEGGPSSGAPPPS- | | |
| | NH₂ | | |
| 416 | Y-Aib-QGT-αMeF(2F)-TSDYSILLDKK((γ-Glu)₂-CO— | 422 | 4764.2 |
| | (CH₂)₁₆—CO₂H)AQ-Aib-NFIEYLEEGGPSSGAPPPS-NH₂ | | |
| 417 | Y-Aib-QGT-αMeF(2F)-TSDYSI-αMeL-LDKK((2-[2-(2- | 423 | 4951.5 |
| | Amino-ethoxy)-ethoxy]-acetyl)-(γ-Glu)-CO—(CH₂)₁₆- | | |
| | CO₂H)AQ-Aib-AFIEYLLETGPSSGAPPPSEG-NH₂ | | |
| 418 | Y-Aib-QGT-αMeF-TSD-4Pal-SILLDKK((2-[2-(2-Amino- | 424 | 4833.4 |
| | ethoxy)-ethoxy]-acetyl)₂-(γ-Glu)-CO—(CH₂)₁₆—CO₂H)AQ- | | |
| | Aib-AFIEYLLEGGPSSGAPPPS-NH₂ | | |
| 419 | Y-Aib-QGT-αMeF-TSDYSILLDKK((2-[2-(2-Amino- | 425 | 4848.5 |
| | ethoxy)-ethoxy]-acetyl)₂-(γ-Glu)-CO—(CH₂)₁₆—CO₂H)AQ- | | |
| | Aib-AFIeYLLEGGPSSGAPPPS-NH₂ | | |
| 420 | Y-Aib-QGT-αMeF-TSDY-αMeS-I-αMeL-LD-Orn-K((2-[2- | 426 | 4817.4 |
| | (2-Amino-ethoxy)-ethoxy]-acetyl)-(γ-Glu)-CO—(CH₂)₁₆- | | |
| | CO₂H)AQ-Aib-AFIeYLLEGGPSSGEPPPE-NH₂ | | |
| 421 | Y-Aib-QGT-αMeF(2F)-TSDYSI-αMeL-LDKK((2-[2-(2- | 427 | 4751.3 |
| | Amino-ethoxy)-ethoxy]-acetyl)-(γ-Glu)-CO—(CH₂)₁₆- | | |
| | CO₂H)AQ-Aib-AFIEYLEEGGPSSGAPPPS-NH₂ | | |
| 422 | Y-Aib-QGT-αMeF(2F)-TSD-4Pal-SI-αMeL-LDKK((2-[2- | 428 | 4736.3 |
| | (2-Amino-ethoxy)-ethoxy]-acetyl)-(γ-Glu)-CO—(CH₂)₁₆- | | |
| | CO₂H)AQ-Aib-AFIEYLEEGGPSSGAPPPS-NH₂ | | |
| 423 | Y-Aib-QGT-αMeF(2F)-TSDYSI-αMeL-LDKK((2-[2-(2- | 429 | 4783.3 |
| | Amino-ethoxy)-ethoxy]-acetyl)-(γ-Glu)-CO—(CH₂)₁₆- | | |
| | CO₂H)AQ-Aib-AFIEYLEEGGPSSGAPEPS-NH₂ | | |
| 424 | Y-Aib-QGT-αMeF(2F)-TSDYSI-αMeL-LDKK((2-[2-(2- | 430 | 4880.4 |
| | Amino-ethoxy)-ethoxy]-acetyl)-(γ-Glu)-CO—(CH₂)₁₆- | | |
| | CO₂H)AQ-Aib-AFIEYLEEGGPSSGAPPPSE-NH₂ | | |
| 425 | H-Aib-QGT-αMeF(2F)-TSDYSILLDKK((2-[2-(2-Amino- | 431 | 4711.2 |
| | ethoxy)-ethoxy]-acetyl)-(γ-Glu)-CO—(CH₂)₁₆—CO₂H)AQ- | | |
| | Aib-AFIEYLEEGGPSSGAPPPS-NH₂ | | |
| 426 | H-Aib-QGT-αMeF(2F)-TSDYSILLDKK((γ-Glu)₂-CO— | 432 | 4695.2 |
| | (CH₂)₁₆—CO₂H)AQ-Aib-AFIEYLEEGGPSSGAPPPS-NH₂ | | |
| 427 | Y-Aib-QGT-αMeF(2F)-TSDYSILLD-Orn-K((2-[2-(2- | 433 | 4852.4 |
| | Amino-ethoxy)-ethoxy]-acetyl)₂-(γ-Glu)-CO—(CH₂)₁₆- | | |
| | CO₂H)AQ-Aib-AFIeYLLEGGPSSGAPPPS-NH₂ | | |
| 428 | Y-Aib-QGT-αMeF(2F)-TSDYSILLD-Orn-K((γ-Glu)₂-CO— | 434 | 4691.2 |
| | (CH₂)₁₆—CO₂H)AQ-Aib-AFIeYLLEGGPSSGAPPPS-NH₂ | | |
| 429 | Y-Aib-QGT-αMeF(2F)-TSD-4Pal-αMeS-I-αMeL-LD-Orn- | 435 | 4995.6 |
| | K((2-[2-(2-Amino-ethoxy)-ethoxy]-acetyl)-(γ-Glu)-CO— | | |
| | (CH₂)₁₆—CO₂H)AQ-Aib-Orn-FIe-αMeY- | | |
| | LIEGGPSSGAPEPSEG-NH₂ | | |
| 430 | Y-Aib-QGT-αMeF(2F)-TSDYSILLDKIAQ-Aib-AFIK((2- | 436 | 4721.3 |
| | [2-(2-Amino-ethoxy)-ethoxy]-acetyl)-(γ-Glu)-CO—(CH₂)₁₆- | | |
| | CO₂H)YLEEGGPSSGAPPPS-NH₂ | | |
| 431 | Y-Aib-QGT-αMeF(2F)-TSDYSI-αMeL-LDKK((2-[2-(2- | 437 | 4937.4 |
| | Amino-ethoxy)-ethoxy]-acetyl)-(γ-Glu)-CO—(CH₂)₁₆- | | |
| | CO₂H)AQ-Aib-AFIEYLEEGGPSSGAPPPSEG-NH₂ | | |
| 432 | Y-Aib-QGT-αMeF(2F)-TSDYSILLDKK((γ-Glu)₂-CO— | 438 | 4779.2 |
| | (CH₂)₁₆—CO₂H)AQ-Aib-AFIEYLEEGGPSSGEPPPS-NH₂ | | |
| 433 | Y-Aib-QGT-αMeF(2F)-TSDYSILLDKK((γ-Glu)₂-CO— | 439 | 4850.3 |
| | (CH₂)₁₆—CO₂H)AQ-Aib-AFIEYLEEGGPSSGAPPPSE-NH₂ | | |
| 434 | Y-Aib-QGT-αMeF(2F)-TSDYSILLDKK((γ-Glu)₂-CO— | 440 | 4907.4 |
| | (CH₂)₁₆—CO₂H)AQ-Aib-AFIEYLEEGGPSSGAPPPSEG- | | |
| | NH₂ | | |
| 435 | Y-Aib-QGT-αMeF(2F)-TSDYSILLDKK((γ-Glu)₂-CO— | 441 | 4907.4 |
| | (CH₂)₁₆—CO₂H)AQ-Aib-AFIEYLEEGGPSSGAPPPSGE- | | |
| | NH₂ | | |
| 436 | Y-Aib-QGT-αMeF(2F)-TSD-4Pal-αMeS-I-αMeL-LD-Orn- | 442 | 4834.4 |
| | K((γ-Glu)₂-CO—(CH₂)₁₆—CO₂H)AQ-Aib-SFIe-αMeY- | | |
| | LIEGGPSSGEPPPE-NH₂ | | |
| 437 | Y-Aib-QGT-αMeF(2F)-TSD-4Pal-αMeS-I-αMeL-LD-Orn- | 443 | 4819.4 |
| | K((γ-Glu)₂-CO—(CH₂)₁₆—CO₂H)AQ-Aib--Orn-FIe-αMeY- | | |
| | LAEGGPSSGEPPPE-NH₂ | | |
| 438 | Y-Aib-QGT-αMeF(2F)-TSD-4Pal-αMeS-I-αMeL-LD-Orn- | 444 | 4835.3 |
| | K((γ-Glu)₂-CO—(CH₂)₁₆—CO₂H)AQ-Aib-Orn-FIe-αMeY- | | |
| | LSEGGPSSGEPPPE-NH₂ | | |
| 439 | Y-Aib-QGT-αMeF(2F)-TSD-4Pal-αMeS-I-αMeL-LD-Orn- | 445 | 4876.4 |
| | K((γ-Glu)₂-CO—(CH₂)₁₆—CO₂H)AQ-Aib-Orn-FIe-αMeY- | | |
| | LQEGGPSSGEPPPE-NH₂ | | |
| 440 | Y-Aib-QGT-αMeF(2F)-TSD-4Pal-SI-αMeL-LDKK((γ- | 446 | 4720.2 |
| | Glu)₂-CO—(CH₂)₁₆—CO₂H)AQ-Aib- | | |
| | AFIEYLEEGGPSSGAPPPS-NH₂ | | |
| 441 | Y-Aib-QGT-αMeF(2F)-TSD-4Pal-SI-αMeL-LD-Orn-K((γ- | 447 | 4706.2 |
| | Glu)₂-CO—(CH₂)₁₆—CO₂H)AQ-Aib- | | |
| | AFIEYLEEGGPSSGAPPPS-NH₂ | | |
| 442 | Y-Aib-QGT-αMeF(2F)-TSD-4Pal-SI-αMeL-LDKK((2-[2- | 448 | 4794.3 |
| | (2-Amino-ethoxy)-ethoxy]-acetyl)-(γ-Glu)-CO—(CH₂)₁₆- | | |
| | CO₂H)AQ-Aib-AFIEYLEEGGPSSGEPPPS-NH₂ | | |
| 443 | Y-Aib-QGT-αMeF(2F)-TSD-4Pal-SI-αMeL-LDKK((2-[2- | 449 | 4768.3 |
| | (2-Amino-ethoxy)-ethoxy]-acetyl)-(γ-Glu)-CO—(CH₂)₁₆- | | |
| | CO₂H)AQ-Aib-AFIEYLEEGGPSSGAPEPS-NH₂ | | |
| 444 | Y-Aib-QGT-αMeF(2F)-TSD-4Pal-αMeS-I-αMeL-LD-Orn- | 450 | 4861.5 |
| | IAQ-Aib-Orn-FIe-αMeY-LIK((2-[2-(2-Amino-ethoxy)- | | |
| | ethoxy]-acetyl)-(γ-Glu)-CO—(CH₂)₁₆—CO₂H)GGPSSGEPPPE | | |
| 445 | Y-Aib-QGT-αMeF(2F)-TSD-4Pal-SI-αMeL-LDKK((2-[2- | 451 | 4778.3 |
| | (2-Amino-ethoxy)-ethoxy]-acetyl)-(γ-Glu)-CO—(CH₂)₁₆- | | |
| | CO₂H)AQ-Aib-AFIEYLEEGGPSSGAPPPE-NH₂ | | |
| 446 | Y-Aib-QGT-αMeF(2F)-TSD-4Pal-SI-αMeL-LDKK((γ- | 452 | 4678.2 |
| | Glu)₂-CO—(CH₂)₁₆—CO₂H)AQ-Aib- | | |
| | AFIEYLSEGGPSSGAPPPS-NH₂ | | |
| 447 | Y-Aib-QGT-αMeF(2F)-TSD-4Pal-αMeS-E-αMeL-LD-Orn- | 453 | 4877.4 |
| | K((γ-Glu)₂-CO—(CH₂)₁₆—CO₂H)AQ-Aib-Orn-FIe-αMeY- | | |
| | LIEGGPSSGEPPPE-NH₂ | | |
| 448 | Y-Aib-QGT-αMeF(2F)-TSD-4Pal-αMeS-I-αMeL-LD-Orn- | 454 | 4847.4 |
| | K((γ-Glu)₂-CO—(CH₂)₁₆—CO₂H)AQ-Aib--Orn- | | |
| | FIeYLIEGGPSSGEPPPE-NH₂ | | |
| 449 | Y-Aib-QGT-αMeF(2F)-TSD-4Pal-αMeS-I-αMeL-LD-Orn- | 455 | 4847.4 |
| | K((γ-Glu)₂-CO—(CH₂)₁₆—CO₂H)AQ-Aib- | | |
| | NFIeYLIEGGPSSGEPPPE-NH₂ | | |
| 450 | Y-Aib-QGT-αMeF(2F)-TSD-4Pal-αMeS-I-αMeL-LD-Orn- | 456 | 4876.4 |
| | K((γ-Glu)₂-CO—(CH₂)₁₆—CO₂H)AQ-Aib-NFIe-αMeY- | | |
| | LQEGGPSSGEPPPE-NH₂ | | |
| 451 | Y-Aib-QGT-αMeF(2F)-TSD-4Pal-αMeS-I-αMeL-LD-Orn- | 457 | 5006.5 |
| | K((2-[2-(2-Amino-ethoxy)-ethoxy]-acetyl)-(γ-Glu)₂-CO— | | |
| | (CH₂)₁₆—CO₂H)AQ-Aib-NFIe-αMeY-LIEGGPSSGEPPPE- | | |
| | NH₂ | | |
| 452 | Y-Aib-QGT-αMeF(2F)-TSD-4Pal-αMeS-I-αMeL-LD-Orn- | 458 | 4893.4 |
| | K((γ-Glu)₂-CO—(CH₂)₁₆—CO₂H)AQ-Aib-NFIe-αMeY- | | |
| | LIEGGPSSGEPEPE-NH₂ | | |
| 453 | Y-Aib-QGT-αMeF(2F)-TSD-4Pal-αMeS-I-αMeL-LD-Orn- | 459 | 4862.5 |
| | K((2-[2-(2-Amino-ethoxy)-ethoxy]-acetyl)-(γ-Glu)-CO— | | |
| | (CH₂)₁₆—CO₂H)AQ-Aib-Orn-FIe-αMe4Pal- | | |
| | LIEGGPSSGEPPPE-NH₂ | | |
| 454 | Y-Aib-QGT-αMeF(2F)-TSD-4Pal-SILLD-Orn-IAQ-Aib- | 460 | 4692.3 |
| | AFIK((2-[2-(2-Amino-ethoxy)-ethoxy]-acetyl)-(γ-Glu)-CO— | | |
| | (CH₂)₁₆—CO₂H)YLEEGGPSSGAPPPS-NH₂ | | |
| 455 | Y-Aib-QGT-αMeF(2F)-TSDYSI-αMeL-LDKIAQ-Aib- | 461 | 4735.3 |
| | AFIK((2-[2-(2-Amino-ethoxy)-ethoxy]-acetyl)-(γ-Glu)-CO— | | |
| | (CH₂)₁₆—CO₂H)YLEEGGPSSGAPPPS-NH₂ | | |
| 456 | Y-Aib-QGT-αMeF(2F)-TSD-4Pal-αMeS-I-αMeL-LD-Orn- | 462 | 4877.4 |
| | K((2-[2-(2-Amino-ethoxy)-ethoxy]-acetyl)-(γ-Glu)-CO— | | |
| | (CH₂)₁₆—CO₂H)AQ-Aib-NFIe-αMeY-LIEGGPSSGEPPPE- | | |
| | NH₂ | | |
| 457 | Y-Aib-QGT-αMeF(2F)-TSD-4Pal-αMeS-I-αMeL-LD-Orn- | 463 | 4864.4 |
| | K((2-[2-(2-Amino-ethoxy)-ethoxy]-acetyl)-(γ-Glu)-CO— | | |
| | (CH₂)₁₆—CO₂H)AQ-Aib-TFIe-αMeY-LIEGGPSSGEPPPE- | | |
| | NH₂ | | |
| 458 | Y-Aib-QGT-αMeF(2F)-TSD-4Pal-αMeS-I-αMeL-LD-Orn- | 464 | 4863.4 |
| | K((2-[2-(2-Amino-ethoxy)-ethoxy]-acetyl)-(γ-Glu)-CO— | | |
| | (CH₂)₁₆—CO₂H)AQ-Aib-Orn-FIeYLIEGGPSSGEPPPE | | |
| 459 | Y-Aib-QGT-αMeF(2F)-TSD-4Pal-αMeS-I-αMeL-LD-Orn- | 465 | 4863.4 |
| | K((2-[2-(2-Amino-ethoxy)-ethoxy]-acetyl)-(γ-Glu)-CO— | | |
| | (CH₂)₁₆—CO₂H)AQ-Aib-Orn-FIEYLIEGGPSSGEPPPE-NH₂ | | |
| 460 | Y-Aib-QGT-αMeF(2F)-TSD-4Pal-αMeS-I-αMeL-LD-Orn- | 466 | 4863.4 |
| | K((2-[2-(2-Amino-ethoxy)-ethoxy]-acetyl)-(γ-Glu)-CO— | | |
| | (CH₂)₁₆—CO₂H)AQ-Aib-Orn-FIeYLLEGGPSSGEPPPE-NH₂ | | |
| 461 | Y-Aib-QGT-αMeF(2F)-TSD-4Pal-αMeS-I-αMeL-LD-Orn- | 467 | 4909.5 |
| | K((2-[2-(2-Amino-ethoxy)-ethoxy]-acetyl)-(γ-Glu)-CO— | | |
| | (CH₂)₁₆—CO₂H)AQ-Aib-Orn-FIe-αMeY- | | |
| | LIEGGPSSGEPEPE-NH₂ | | |
| 462 | Y-Aib-QGT-αMeF(2F)-TSD-4Pal-αMeS-I-αMeL-LD-Orn- | 468 | 5063.6 |
| | K((2-[2-(2-Amino-ethoxy)-ethoxy]-acetyl)-(γ-Glu)-CO— | | |
| | (CH₂)₁₆—CO₂H)AQ-Aib-Orn-FIe-αMeY- | | |
| | LIEGGPSSGEPPPEEG-NH₂ | | |
| 463 | Y-Aib-QGT-αMeF(2F)-TSD-4Pal-αMeS-I-αMeL-LD-Orn- | 469 | 5007.6 |
| | K((2-[2-(2-Amino-ethoxy)-ethoxy]-acetyl)-(γ-Glu)-CO— | | |
| | (CH₂)₁₆—CO₂H)AQ-Aib-Orn-FIeYLIEGGPSSGEPPPSEG- | | |
| | NH₂ | | |
| 464 | Y-Aib-QGT-αMeF(2F)-TSD-4Pal-αMeS-ILLDKK((2-[2-(2- | 470 | 4778.3 |
| | Amino-ethoxy)-ethoxy]-acetyl)-(γ-Glu)-CO—(CH₂)₁₆- | | |
| | CO₂H)AQ-Aib-AFIEYLEEGGPSSGAPPPE-NH₂ | | |
| 465 | Y-Aib-QGT-αMeF(2F)-TSD-3Pal-αMeS-ILLDKK((2-[2-(2- | 471 | 4778.3 |
| | Amino-ethoxy)-ethoxy]-acetyl)-(γ-Glu)-CO—(CH₂)₁₆- | | |
| | CO₂H)AQ-Aib-AFIEYLEEGGPSSGAPPPE-NH₂ | | |
| 466 | H-Aib-QGT-αMeF(2F)-TSD-4Pal-αMeS-I-αMeL-LD-Orn- | 472 | 4794.3 |
| | K((2-[2-(2-Amino-ethoxy)-ethoxy]-acetyl)-(γ-Glu)-CO— | | |
| | (CH₂)₁₆—CO₂H)AQ-Aib-AFIeYLLEGGPSSGEPPPE-NH₂ | | |
| 467 | Y-Aib-QGT-αMeF(2F)-TSDY-αMeS-ELLDKK((2-[2-(2- | 473 | 4809.3 |
| | Amino-ethoxy)-ethoxy]-acetyl)-(γ-Glu)-CO—(CH₂)₁₆- | | |
| | CO₂H)AQ-Aib-AFIEYLEEGGPSSGAPPPE-NH₂ | | |
| 468 | Y-Aib-QGT-αMeF(2F)-TSDY-αMeS-ILLDKK((2-[2-(2- | 474 | 4938.5 |
| | Amino-ethoxy)-ethoxy]-acetyl)₂-(γ-Glu)-CO—(CH₂)₁₆- | | |
| | CO₂H)AQ-Aib-AFIEYLEEGGPSSGAPPPE-NH₂ | | |
| 469 | Y-Aib-QGT-αMeF(2F)-TSDY-αMeS-ILLDKK((2-[2-(2- | 475 | 4996.5 |
| | Amino-ethoxy)-ethoxy]-acetyl)₂-(γ-Glu)-CO—(CH₂)₁₆- | | |
| | CO₂H)AQ-Aib-AFIEYLEEGGPSSGEPPPE-NH₂ | | |
| 470 | Y-Aib-QGT-αMeF(2F)-TSDYSILLDKK((γ-Glu)₂-CO— | 476 | 4979.4 |
| | (CH₂)₁₆—CO₂H)AQ-Aib-AFIEYLEEGGPSSGAPPPSEG- | | |
| | NH₂ | | |
| 471 | Y-Aib-QGT-αMeF(2F)-TSDYSILLDKK((γ-Glu)₂-CO— | 477 | 4949.4 |
| | (CH₂)₁₆—CO₂H)AQ-Aib-AFIEYLEEGGPSSGAPPPEEG- | | |
| | NH₂ | | |
| 472 | Y-Aib-QGT-αMeF(2F)-TSD-4Pal-αMeS-I-αMeL-LD-Orn- | 478 | 5140.7 |
| | K((2-[2-(2-Amino-ethoxy)-ethoxy]-acetyl)₂-(γ-Glu)-CO— | | |
| | (CH₂)₁₆—CO₂H)AQ-Aib-Orn-FIe-αMeY- | | |
| | LIEGGPSSGAPEPSEG-NH₂ | | |
| 473 | Y-Aib-QGT-αMeF(2F)-TSD-4Pal-αMeS-I-αMeL-LD-Orn- | 479 | 5037.5 |
| | K((γ-Glu)₂-CO—(CH₂)₁₆—CO₂H)AQ-Aib-NFIe-αMeY- | | |
| | LIEGGPSSGEPEPSEG-NH₂ | | |
| 474 | Y-Aib-QGT-αMeF(2F)-TSD-4Pal-αMeS-I-αMeL-LD-Orn- | 480 | 5079.6 |
| | K((γ-Glu)₂-CO—(CH₂)₁₆—CO₂H)AQ-Aib-NFIe-αMeY- | | |
| | LIEGGPSSGEPEPEEG-NH₂ | | |
| 475 | Y-Aib-QGT-αMeF(2F)-TSD-4Pal-SI-αMeL-LD-Orn-K((2- | 481 | 5126.7 |
| | [2-(2-Amino-ethoxy)-ethoxy]-acetyl)-(γ-Glu)-CO—(CH₂)₁₆- | | |
| | CO₂H)AQ-αMe4Pal-Orn-FIe-αMeY- | | |
| | LIEGGPSSGEPPPEEG-NH₂ | | |
| 476 | Y-Aib-QGT-αMeF(2F)-TSD-4Pal-αMeS-I-αMeL-LD-Orn- | 482 | 5049.6 |
| | K((2-[2-(2-Amino-ethoxy)-ethoxy]-acetyl)-(γ-Glu)-CO— | | |
| | (CH₂)₁₆—CO₂H)AQ-Aib-Orn-FIEYLIEGGPSSGEPPPEEG- | | |
| | NH₂ | | |
| 477 | Y-Aib-QGT-αMeF(2F)-TSD-4Pal-SI-αMeL-LD-Orn-K((2- | 483 | 5035.6 |
| | [2-(2-Amino-ethoxy)-ethoxy]-acetyl)-(γ-Glu)-CO—(CH₂)₁₆- | | |
| | CO₂H)AQ-Aib-Orn-FIEYLIEGGPSSGEPPPEEG-NH₂ | | |
| 478 | H-Aib-QGT-αMeF(2F)-TSD-4Pal-αMeS-I-αMeL-LD-Orn- | 484 | 4900.4 |
| | K((2-[2-(2-Amino-ethoxy)-ethoxy]-acetyl)-(γ-Glu)-CO— | | |
| | (CH₂)₁₆—CO₂H)AQ-αMe4Pal-NFIeYLLEGGPSSGEPPPE- | | |
| | NH₂ | | |
| 479 | H-Aib-QGT-αMeF(2F)-TSD-4Pal-αMeS-I-αMeL-LD-Orn- | 485 | 4826.3 |
| | K((2-[2-(2-Amino-ethoxy)-ethoxy]-acetyl)-(γ-Glu)-CO— | | |
| | (CH₂)₁₆—CO₂H)AQ-Aib-AFIeYLLEGGPSSGEPEPE-NH₂ | | |
| 480 | Y-Aib-QGT-αMeF(2F)-TSD-4Pal-αMeS-I-αMeL-LD-Orn- | 486 | 5005.6 |
| | K((γ-Glu)₂-CO—(CH₂)₁₆—CO₂H)AQ-Aib-Orn-FIe-αMeY- | | |
| | LIEGGPSSGEPPPSEG-NH₂ | | |
| 481 | Y-Aib-QGT-αMeF(2F)-TSD-4Pal-αMeS-I-αMeL-LD-Orn- | 487 | 5053.6 |
| | K((2-[2-(2-Amino-ethoxy)-ethoxy]-acetyl)-(γ-Glu)-CO— | | |
| | (CH₂)₁₆—CO₂H)AQ-Aib-Orn-FIe-αMeY- | | |
| | LIEGGPSSGEPEPSEG-NH₂ | | |
| 482 | Y-Aib-QGT-αMeF(2F)-TSD-4Pal-αMeS-I-αMeL-LD-Orn- | 488 | 5049.6 |
| | K((2-[2-(2-Amino-ethoxy)-ethoxy]-acetyl)-(γ-Glu)-CO— | | |
| | (CH₂)₁₆—CO₂H)AQ-Aib-NFIEYLIEGGPSSGEPPPEEG-NH₂ | | |
| 483 | Y-Aib-QGT-αMeF(2F)-TSD-4Pal-αMeS-I-αMeL-LD-Orn- | 489 | 5049.6 |
| | K((2-[2-(2-Amino-ethoxy)-ethoxy]-acetyl)-(γ-Glu)-CO— | | |
| | (CH₂)₁₆—CO₂H)AQ-Aib-NFIEYLIEGGPSSGEPPPEGE-NH₂ | | |
| 484 | Y-Aib-QGT-αMeF(2F)-TSD-4Pal-αMeS-I-αMeL-LD-Orn- | 490 | 5063.6 |
| | K((2-[2-(2-Amino-ethoxy)-ethoxy]-acetyl)-(γ-Glu)-CO— | | |
| | (CH₂)₁₆—CO₂H)AQ-Aib-Orn-FIEYLIEAGPSSGEPPPEEG- | | |
| | NH₂ | | |
| 485 | Y-Aib-QGT-αMeF(2F)-TSD-4Pal-αMeS-I-αMeL-LD-Orn- | 491 | 5192.8 |
| | K((2-[2-(2-Amino-ethoxy)-ethoxy]-acetyl)-(γ-Glu)₂-CO— | | |
| | (CH₂)₁₆—CO₂H)AQ-Aib-Orn-FIEYLIEAGPSSGEPPPEEG- | | |
| | NH₂ | | |
| 486 | Y-Aib-QGT-αMeF(2F)-TSD-4Pal-SI-αMeL-LD-Orn-K((2- | 492 | 4780.3 |
| | [2-(2-Amino-ethoxy)-ethoxy]-acetyl)-(γ-Glu)-CO—(CH₂)₁₆- | | |
| | CO₂H)AQ-Aib-AFIEYLEEGGPSSGEPPPS-NH₂ | | |
| 487 | Y-Aib-QGT-αMeF(2F)-TSD-4Pal-SI-αMeL-LDKK((2-[2- | 493 | 4836.3 |
| | (2-Amino-ethoxy)-ethoxy]-acetyl)-(γ-Glu)-CO—(CH₂)₁₆- | | |
| | CO₂H)AQ-Aib-AFIEYLEEGGPSSGEPPPE-NH₂ | | |
| 488 | Y-Aib-QGT-αMeF(2F)-TSD-4Pal-SI-αMeL-LDKK((2-[2- | 494 | 4980.5 |
| | (2-Amino-ethoxy)-ethoxy]-acetyl)-(γ-Glu)-CO—(CH₂)₁₆- | | |
| | CO₂H)AQ-Aib-AFIEYLEEGGPSSGEPPPSEG-NH₂ | | |
| 489 | Y-Aib-QGT-αMeF(2F)-TSD-4Pal-SI-αMeL-LD-Orn-K((2- | 495 | 4993.5 |
| | [2-(2-Amino-ethoxy)-ethoxy]-acetyl)-(γ-Glu)-CO—(CH₂)₁₆- | | |
| | CO₂H)AQ-Aib-Orn-FIEYLIEGGPSSGEPPPSEG-NH₂ | | |
| 490 | Y-Aib-QGT-αMeF(2F)-TSD-4Pal-αMeS-I-αMeL-LD-Orn- | 496 | 5166.8 |
| | K((2-[2-(2-Amino-ethoxy)-ethoxy]-acetyl)₂-(γ-Glu)-CO— | | |
| | (CH₂)₁₆—CO₂H)AQ-Aib-Orn-FIe-αMeY- | | |
| | LIEGGPSSGEPPPSEG-NH₂ | | |
| 491 | Y-Aib-QGT-αMeF(2F)-TSD-4Pal-αMeS-I-αMeL-LD-Orn- | 497 | 5152.7 |
| | K((2-[2-(2-Amino-ethoxy)-ethoxy]-acetyl)₂-(γ-Glu)-CO— | | |
| | (CH₂)₁₆—CO₂H)AQ-Aib-Orn-FIEYLIEGGPSSGEPPPSEG- | | |
| | NH₂ | | |
| 492 | Y-Aib-QGT-αMeF(2F)-TSD-4Pal-αMeS-I-αMeL-LD-Orn- | 498 | 5126.7 |
| | K((2-[2-(2-Amino-ethoxy)-ethoxy]-acetyl)₂-(γ-Glu)-CO— | | |
| | (CH₂)₁₆—CO₂H)AQ-Aib-Orn-FIEYLIEGGPSSGAPEPSEG- | | |
| | NH₂ | | |
| 493 | Y-Aib-QGT-αMeF(2F)-TSD-4Pal-SI-αMeL-LDKK((2-[2- | 499 | 4980.5 |
| | (2-Amino-ethoxy)-ethoxy]-acetyl)-(γ-Glu)-CO—(CH₂)₁₆- | | |
| | CO₂H)AQ-Aib-AFIEYLEEGGPSSGEPPPSEG-NH₂ | | |
| 494 | Y-Aib-QGT-αMeF(2F)-TSD-4Pal-SI-αMeL-LD-Orn-K((2- | 500 | 5035.6 |
| | [2-(2-Amino-ethoxy)-ethoxy]-acetyl)-(γ-Glu)-CO—(CH₂)₁₆- | | |
| | CO₂H)AQ-Aib--Orn-FIEYLLEGGPSSGEPPPEEG-NH₂ | | |
| 495 | Y-Aib-QGT-αMeF(2F)-TSD-F(4NO2)-SI-αMeL-LDKK((2- | 501 | 4822.3 |
| | [2-(2-Amino-ethoxy)-ethoxy]-acetyl)-(γ-Glu)-CO—(CH₂)₁₆- | | |
| | CO₂H)AQ-Aib-AFIEYLEEGGPSSGAPPPE-NH₂ | | |
| 496 | Y-Aib-QGTFTSDFS-Orn-αMeL-LDKK((2-[2-(2-Amino- | 502 | 4787.4 |
| | ethoxy)-ethoxy]-acetyl)-(γ-Glu)-CO—(CH₂)₁₆—CO₂H)AQ- | | |
| | Aib-AFIE-4Pal-LLEGGPSSGAPPPGGS-NH₂ | | |
| 497 | Y-Aib-QGTFTSD-4Pal-S-Orn-αMeL-LDKK((2-[2-(2- | 503 | 4924.5 |
| | Amino-ethoxy)-ethoxy]-acetyl)-(γ-Glu)-CO—(CH₂)₁₆- | | |
| | CO₂H)AQ-αMe4Pal-AFIE-αMeY-LIEGGPSSGAPPPSGS- | | |
| | NH₂ | | |
| 498 | Y-Aib-QGTFTSD-4Pal-SQ-αMeL-LDKK((2-[2-(2-Amino- | 504 | 4951.5 |
| | ethoxy)-ethoxy]-acetyl)-(γ-Glu)-CO—(CH₂)₁₆—CO₂H)AQ- | | |
| | αMe4Pal-AFIE-αMe4Pal-LIE-Aib-GPSSGAPPPSGS-NH₂ | | |
| 499 | Y-Aib-QGT-αMeF(2F)-TSD-4Pal-SILLD-Orn-K((2-[2-(2- | 505 | 5084.7 |
| | Amino-ethoxy)-ethoxy]-acetyl)-(γ-Glu)-CO—(CH₂)₁₆- | | |
| | CO₂H)AQ-Me4Pal-Orn-FIe-αMeY-LIEGGPSSGEPPPEGT | | |
| 500 | Y-Aib-QGT-αMeF(2F)-TSD-4Pal-SI-αMeL-LD-Orn-K((2- | 506 | 5084.7 |
| | [2-(2-Amino-ethoxy)-ethoxy]-acetyl)-(γ-Glu)-CO—(CH₂)₁₆- | | |
| | CO₂H)AQ-Me4Pal-Orn-FIeYLIEGGPSSGEPPPEGT-NH₂ | | |
| 501 | Y-Aib-QGT-αMeF(2F)-TSD-4Pal-αMeS-I-αMeL-LD-Orn- | 507 | 5108.7 |
| | K((2-[2-(2-Amino-ethoxy)-ethoxy]-acetyl)-(γ-Glu)-CO— | | |
| | (CH₂)₁₆—CO₂H)AQ-Aib-Orn-FIeYLIEGGPSSGEPPPSGTE- | | |
| | NH₂ | | |
| 502 | Y-Aib-QGT-αMeF(2F)-TSD-4Pal-αMeS-I-αMeL-LD-Orn- | 508 | 4980.5 |
| | K((2-[2-(2-Amino-ethoxy)-ethoxy]-acetyl)-(γ-Glu)-CO— | | |
| | (CH₂)₁₆—CO₂H)AQ-Aib-Orn-FIeYLIEGGPSSGEPPPSGT | | |
| 503 | Y-Aib-QGT-αMeF(2F)-TSD-4Pal-αMeS-I-αMeL-LD-Orn- | 509 | 5163.7 |
| | K((γ-Glu)₂-CO—(CH₂)₁₆—CO₂H)AQ-Aib-Orn-FIe-αMeY- | | |
| | LQEGGPSSGEPPPEGTE-NH₂ | | |
| 504 | Y-Aib-QGT-αMeF(2F)-TSD-4Pal-αMeS-I-αMeL-LD-Orn- | 510 | 5121.6 |
| | K((γ-Glu)₂-CO—(CH₂)₁₆—CO₂H)AQ-Aib-Orn-FIe-αMeY- | | |
| | LQEGGPSSGEPPPSGTE-NH₂ | | |
| 505 | Y-Aib-QGT-αMeF(2F)-TSD-4Pal-SI-αMeL-LD-Orn-K((2- | 511 | 5098.7 |
| | [2-(2-Amino-ethoxy)-ethoxy]-acetyl)-(γ-Glu)-CO—(CH₂)₁₆- | | |
| | CO₂H)AQ-Me4Pal-Orn-FIE-αMeY- | | |
| | LIEGGPSSGEPPPEGT-NH₂ | | |
| 506 | Y-Aib-QGT-αMeF(2F)-TSD-4Pal-SI-αMeL-LD-Orn-K((2- | 512 | 5114.6 |
| | [2-(2-Amino-ethoxy)-ethoxy]-acetyl)-(γ-Glu)-CO—(CH₂)₁₆- | | |
| | CO₂H)AQ-Me4Pal-Orn-FIe-αMeY- | | |
| | LEEGGPSSGEPPPEGT-NH₂ | | |
| 507 | Y-Aib-QGT-αMeFTSD-4Pal-SI-αMeL-LD-Orn-K((2-[2-(2- | 513 | 5098.7 |
| | Amino-ethoxy)-ethoxy]-acetyl)-(γ-Glu)-CO—(CH₂)₁₆- | | |
| | CO₂H)AQ-Me4Pal-Orn-FIe-αMeY-LIEGGPSSGEPPPEGT- | | |
| | NH₂ | | |
| 508 | Y-Aib-QGT-αMeFTSD-4Pal-SI-αMeL-LD-Orn-K((2-[2-(2- | 514 | 5040.6 |
| | Amino-ethoxy)-ethoxy]-acetyl)-(γ-Glu)-CO—(CH₂)₁₆- | | |
| | CO₂H)AQ-Me4Pal-Orn-FIe-αMeY-LIEGGPSSGAPPPEGT- | | |
| | NH₂ | | |
| 509 | Y-Aib-QGT-αMeF(2F)-TSD-4Pal-SILLDKK((γ-Glu)₂-CO— | 515 | 4993.5 |
| | (CH₂)₁₆—CO₂H)AQ-Aib-AFIEYLEEGGPSSGAPPPSGTE- | | |
| | NH₂ | | |
| 510 | Y-Aib-QGT-αMeF(2F)-TSD-4Pal-SILLDKK((γ-Glu)₂-CO— | 516 | 5050.5 |
| | (CH₂)₁₆—CO₂H)AQ-Aib-AFIEYLEEGGPSSGAPPPSGTGE- | | |
| | NH₂ | | |
| 511 | Y-Aib-QGT-αMeF(2F)-TSD-4Pal-SILLDKK((γ-Glu)₂-CO— | 517 | 4994.4 |
| | (CH₂)₁₆—CO₂H)AQ-Aib-AFIEYLEEGGPSSGAPPPSGTE | | |
| 512 | Y-Aib-QGT-αMeF(2F)-TSD-4Pal-SILLDKK((γ-Glu)₂-CO— | 518 | 5051.5 |
| | (CH₂)₁₆—CO₂H)AQ-Aib-AFIEYLEEGGPSSGAPPPSGTGE | | |
| 513 | Y-Aib-QGT-αMeF(2F)-TSD-4Pal-SILLD-Orn-K((γ-Glu)₂- | 519 | 4979.4 |
| | CO—(CH₂)₁₆—CO₂H)AQ-Aib- | | |
| | AFIEYLEEGGPSSGAPPPSGTE-NH₂ | | |
| 514 | Y-Aib-QGT-αMeF(2F)-TSD-4Pal-SILLD-Orn-K((γ-Glu)₂- | 520 | 5036.5 |
| | CO—(CH₂)₁₆—CO₂H)AQ-Aib- | | |
| | AFIEYLEEGGPSSGAPPPSGTGE-NH₂ | | |
| 515 | Y-Aib-QGT-αMeF(2F)-TSD-4Pal-SILLD-Orn-K((γ-Glu)₂- | 521 | 4980.4 |
| | CO—(CH₂)₁₆—CO₂H)AQ-Aib- | | |
| | AFIEYLEEGGPSSGAPPPSGTE | | |
| 516 | Y-Aib-QGT-αMeF(2F)-TSD-4Pal-SILLD-Orn-K((γ-Glu)₂- | 522 | 5037.5 |
| | CO—(CH₂)₁₆—CO₂H)AQ-Aib- | | |
| | AFIEYLEEGGPSSGAPPPSGTGE | | |
| 517 | Y-Aib-QGT-αMeF(2F)-TSD-4Pal-αMeS-I-αMeL-LD-Orn- | 523 | 5080.6 |
| | K((γ-Glu)₂-CO—(CH₂)₁₆—CO₂H)AQ-Aib-Orn-FIe-αMeY- | | |
| | LSEGGPSSGEPPPSGTE-NH₂ | | |
| 518 | Y-Aib-QGT-αMeF(2F)-TSD-4Pal-αMeS-I-αMeL-LD-Orn- | 524 | 5137.6 |
| | K((γ-Glu)₂-CO—(CH₂)₁₆—CO₂H)AQ-Aib-Orn-FIe-αMeY- | | |
| | LSEGGPSSGEPPPSGTGE-NH₂ | | |
| 519 | Y-Aib-QGT-αMeF(2F)-TSD-4Pal-αMeS-I-αMeL-LD-Orn- | 525 | 5081.6 |
| | K((γ-Glu)₂-CO—(CH₂)₁₆—CO₂H)AQ-Aib-Orn-FIe-αMeY- | | |
| | LSEGGPSSGEPPPSGTE | | |
| 520 | Y-Aib-QGT-αMeF(2F)-TSD-4Pal-αMeS-I-αMeL-LD-Orn- | 526 | 5138.6 |
| | K((γ-Glu)₂-CO—(CH₂)₁₆—CO₂H)AQ-Aib-Orn-FIe-αMeY- | | |
| | LSEGGPSSGEPPPSGTGE | | |
| 521 | Y-Aib-QGT-αMeF(2F)-TSD-4Pal-αMeS-I-αMeL-LD-Orn- | 527 | 5092.6 |
| | K((γ-Glu)₂-CO—(CH₂)₁₆—CO₂H)AQ-Aib-Orn- | | |
| | FIeYLIEGGPSSGEPPPSGTE-NH₂ | | |
| 522 | Y-Aib-QGT-αMeF(2F)-TSD-4Pal-αMeS-I-αMeL-LD-Orn- | 528 | 5093.6 |
| | K((γ-Glu)₂-CO—(CH₂)₁₆—CO₂H)AQ-Aib-Orn- | | |
| | FIeYLIEGGPSSGEPPPSGTE | | |
| 523 | Y-Aib-QGT-αMeF(2F)-TSD-4Pal-αMeS-I-αMeL-LD-Orn- | 529 | 5149.7 |
| | K((γ-Glu)₂-CO—(CH₂)₁₆—CO₂H)AQ-Aib-Orn- | | |
| | FIeYLIEGGPSSGEPPPSGTGE-NH₂ | | |
| 524 | Y-Aib-QGT-αMeF(2F)-TSD-4Pal-αMeS-I-αMeL-LD-Orn- | 530 | 5150.7 |
| | K((γ-Glu)₂-CO—(CH₂)₁₆—CO₂H)AQ-Aib-Orn- | | |
| | FIeYLIEGGPSSGEPPPSGTGE | | |
| 525 | Y-Aib-QGT-αMeF(2F)-TSD-4Pal-αMeS-I-αMeL-LD-Orn- | 531 | 5034.5 |
| | K((γ-Glu)₂-CO—(CH₂)₁₆—CO₂H)AQ-Aib-NFIe-αMeY- | | |
| | LQEGGPSSGEPPPEGT-NH₂ | | |
| 526 | Y-Aib-QGT-αMeF(2F)-TSD-4Pal-αMeS-I-αMeL-LD-Orn- | 532 | 5163.6 |
| | K((γ-Glu)₂-CO—(CH₂)₁₆—CO₂H)AQ-Aib-NFIe-αMeY- | | |
| | LQEGGPSSGEPPPEGTE-NH₂ | | |
| 527 | Y-Aib-QGT-αMeF(2F)-TSD-4Pal-αMeS-I-αMeL-LD-Orn- | 533 | 5220.7 |
| | K((γ-Glu)₂-CO—(CH₂)₁₆—CO₂H)AQ-Aib-NFIe-αMeY- | | |
| | LQEGGPSSGEPPPEGTGE-NH₂ | | |
| 528 | Y-Aib-QGT-αMeF(2F)-TSD-4Pal-αMeS-I-αMeL-LD-Orn- | 534 | 5177.7 |
| | K((γ-Glu)₂-CO—(CH₂)₁₆—CO₂H)AQ-Aib-QFIe-αMeY- | | |
| | LQEGGPSSGEPPPEGTE-NH₂ | | |
| 529 | Y-Aib-QGT-αMeF(2F)-TSD-4Pal-αMeS-I-αMeL-LD-Orn- | 535 | 5234.7 |
| | K((γ-Glu)₂-CO—(CH₂)₁₆—CO₂H)AQ-Aib-QFIe-αMeY- | | |
| | LQEGGPSSGEPPPEGTGE-NH₂ | | |
| 530 | Y-Aib-QGT-αMeF(2F)-TSD-4Pal-αMeS-I-αMeL-LD-Orn- | 536 | 5066.6 |
| | K((γ-Glu)₂-CO—(CH₂)₁₆—CO₂H)AQ-Aib-Orn- | | |
| | FIeYLSEGGPSSGEPPPSGTE-NH₂ | | |
| 531 | Y-Aib-QGT-αMeF(2F)-TSD-4Pal-αMeS-ILLD-Orn-K((γ- | 537 | 5078.6 |
| | Glu)₂-CO—(CH₂)₁₆—CO₂H)AQ-Aib-Orn- | | |
| | FIeYLIEGGPSSGEPPPSGTE-NH₂ | | |
| 532 | Y-Aib-QGT-αMeF(2F)-TSD-4Pal-αMeS-I-αMeL-LD-Orn- | 538 | 5092.6 |
| | K((γ-Glu)₂-CO—(CH₂)₁₆—CO₂H)AQ-Aib-Orn- | | |
| | FIeYLLEGGPSSGEPPPSGTE-NH₂ | | |
| 533 | Y-Aib-QGT-αMeF(2F)-TSD-4Pal-αMeS-I-αMeL-LD-Orn- | 539 | 5237.8 |
| | K((2-[2-(2-Amino-ethoxy)-ethoxy]-acetyl)-(γ-Glu)-CO— | | |
| | (CH₂)₁₆—CO₂H)AQ-Aib-Orn- | | |
| | FIeYLIEGGPSSGEPPPSGTEE-NH₂ | | |
| 534 | Y-Aib-QGT-αMeF(2F)-TSD-4Pal-αMeS-I-αMeL-LD-Orn- | 540 | 5366.9 |
| | K((2-[2-(2-Amino-ethoxy)-ethoxy]-acetyl)-(γ-Glu)-CO— | | |
| | (CH₂)₁₆—CO₂H)AQ-Aib-Orn- | | |
| | FIeYLIEGGPSSGEPPPSGTEEE-NH₂ | | |
| 535 | Y-Aib-QGT-αMeF(2F)-TSD-4Pal-αMeS-I-αMeL-LD-Orn- | 541 | 5221.8 |
| | K((γ-Glu)₂-CO—(CH₂)₁₆—CO₂H)AQ-Aib-Orn- | | |
| | FIeYLIEGGPSSGEPPPSGTEE-NH₂ | | |
| 536 | Y-Aib-QGT-αMeF(2F)-TSD-4Pal-αMeS-I-αMeL-LD-Orn- | 542 | 5350.9 |
| | K((γ-Glu)₂-CO—(CH₂)₁₆—CO₂H)AQ-Aib-Orn- | | |
| | FIeYLIEGGPSSGEPPPSGTEEE-NH₂ | | |
| 537 | Y-Aib-QGT-αMeF(2F)-TSD-4Pal-αMeS-I-αMeL-LD-Orn- | 543 | 5238.8 |
| | K((2-[2-(2-Amino-ethoxy)-ethoxy]-acetyl)-(γ-Glu)-CO— | | |
| | (CH₂)₁₆—CO₂H)AQ-Aib-Orn-FIeYLIEGGPSSGEPPPSGTEE | | |
| 538 | Y-Aib-QGT-αMeF(2F)-TSD-4Pal-αMeS-I-αMeL-LD-Orn- | 544 | 5367.9 |
| | K((2-[2-(2-Amino-ethoxy)-ethoxy]-acetyl)-(γ-Glu)-CO— | | |
| | (CH₂)₁₆—CO₂H)AQ-Aib-Orn- | | |
| | FIeYLIEGGPSSGEPPPSGTEEE-NH₂ | | |
| 539 | Y-Aib-QGT-αMeF(2F)-TSD-4Pal-αMeS-I-αMeL-LD-Orn- | 545 | 5222.7 |
| | K((γ-Glu)₂-CO—(CH₂)₁₆—CO₂H)AQ-Aib-Orn- | | |
| | FIeYLIEGGPSSGEPPPSGTEE | | |
| 540 | Y-Aib-QGT-αMeF(2F)-TSD-4Pal-αMeS-I-αMeL-LD-Orn- | 546 | 5351.8 |
| | K((γ-Glu)₂-CO—(CH₂)₁₆—CO₂H)AQ-Aib-Orn- | | |
| | FIeYLIEGGPSSGEPPPSGTEEE-NH₂ | | |
| 541 | Y-Aib-QGT-αMeF(2F)-TSD-4Pal-SI-αMeL-LD-Orn-K((γ- | 547 | 5068.6 |
| | Glu)₂-CO—(CH₂)₁₆—CO₂H)AQ-Me4Pal-Orn- | | |
| | FIeYLIEGGPSSGEPPPEGT | | |
| 542 | Y-Aib-QGT-αMeF(2F)-TSD-4Pal-αMeS-I-αMeL-LD-Orn- | 548 | 5094.6 |
| | K((γ-Glu)₂-CO—(CH₂)₁₆—CO₂H)AQ-Aib-Orn-FIe-αMeY- | | |
| | LTEGGPSSGEPPPSGTE-NH₂ | | |
| 543 | Y-Aib-QGT-αMeF(2F)-TSD-4Pal-αMeS-I-αMeL-LD-Orn- | 549 | 5151.7 |
| | K((γ-Glu)₂-CO—(CH₂)₁₆—CO₂H)AQ-Aib-Orn-FIe-αMeY- | | |
| | LTEGGPSSGEPPPSGTGE-NH₂ | | |
| 544 | Y-Aib-QGT-αMeF(2F)-TSD-4Pal-αMeS-I-αMeL-LD-Orn- | 550 | 5064.6 |
| | K((γ-Glu)₂-CO—(CH₂)₁₆—CO₂H)AQ-Aib-Orn-FIe-αMeY- | | |
| | LAEGGPSSGEPPPSGTE-NH₂ | | |
| 545 | Y-Aib-QGT-αMeF(2F)-TSD-4Pal-αMeS-I-αMeL-LD-Orn- | 551 | 5121.6 |
| | K((γ-Glu)₂-CO—(CH₂)₁₆—CO₂H)AQ-Aib-Orn-FIe-αMeY- | | |
| | LAEGGPSSGEPPPSGTGE-NH₂ | | |
| 546 | Y-Aib-QGT-αMeF(2F)-TSD-4Pal-αMeS-ILLD-Orn-K((γ- | 552 | 5119.6 |
| | Glu)₂-CO—(CH₂)₁₆—CO₂H)AQ-Aib-Orn-FIe-αMeY- | | |
| | LQEGGPSSGEPPPEGAE-NH₂ | | |
| 547 | Y-Aib-QGT-αMeF(2F)-TSD-4Pal-αMeS-ILLD-Orn-K((γ- | 553 | 5077.6 |
| | Glu)₂-CO—(CH₂)₁₆—CO₂H)AQ-Aib-Orn-FIe-αMeY- | | |
| | LQEGGPSSGEPPPSGAE-NH₂ | | |
| 548 | Y-Aib-QGT-αMeF(2F)-TSD-4Pal-αMeS-ILLD-Orn-K((γ- | 554 | 5135.7 |
| | Glu)₂-CO—(CH₂)₁₆—CO₂H)AQ-Aib-Orn- | | |
| | FIeYLIEGGPSSGEPPPSGTGE-NH₂ | | |
| 549 | Y-Aib-QGT-αMeF(2F)-TSD-4Pal-SILLDK-K((γ-Glu)₂-CO— | 555 | 5016.5 |
| | (CH₂)₁₆—CO₂H)AQ-Aib-AFIEWLEEGGPSSGAPPPSGTE- | | |
| | NH₂ | | |
| 550 | Y-Aib-QGT-αMeF(2F)-TSD-4Pal-SILLDK-K((γ-Glu)₂-CO— | 556 | 4978.5 |
| | (CH₂)₁₆—CO₂H)AQ-Aib-AFIE-4Pal- | | |
| | LEEGGPSSGAPPPSGTE-NH₂ | | |
| 551 | Y-Aib-QGT-αMeF(2F)-TSD-4Pal-SILLDK-K((γ-Glu)₂-CO— | 557 | 5007.5 |
| | (CH₂)₁₆—CO₂H)AQ-Aib-AFIE-αMeY- | | |
| | LEEGGPSSGAPPPSGTE-NH₂ | | |
| 552 | Y-Aib-QGT-αMeF(2F)-TSD-4Pal-SILLDK-K((γ-Glu)₂-CO— | 558 | 4992.5 |
| | (CH₂)₁₆—CO₂H)AQ-Aib-AFIE-Me4Pal- | | |
| | LEEGGPSSGAPPPSGTE-NH₂ | | |
| 553 | Y-Aib-QGT-αMeF(2F)-TSD-4Pal-SILLDK-K((γ-Glu)₂-CO— | 559 | 4992.5 |
| | (CH₂)₁₆—CO₂H)AQ-Aib-AFIEYLQEGGPSSGAPPPSGTE- | | |
| | NH₂ | | |
| 554 | Y-Aib-QGT-αMeF(2F)-TSD-4Pal-SILLDK-K((γ-Glu)₂-CO— | 560 | 4965.5 |
| | (CH₂)₁₆—CO₂H)AQ-Aib-AFIEYLTEGGPSSGAPPPSGTE- | | |
| | NH₂ | | |
| 555 | Y-Aib-QGT-αMeF(2F)-TSD-4Pal-αMeS-ILLD-Orn-K((γ- | 561 | 5120.7 |
| | Glu)₂-CO—(CH₂)₁₆—CO₂H)AQ-Aib-Orn- | | |
| | FIeYLIEGGPSSGEPPPSETE-NH₂ | | |
| 556 | Y-Aib-QGT-αMeF(2F)-TSD-4Pal-αMeS-ILLD-Orn-K((γ- | 562 | 5249.8 |
| | Glu)₂-CO—(CH₂)₁₆—CO₂H)AQ-Aib-Orn- | | |
| | FIeYLIEGGPSSGEPPPEGTEE-NH₂ | | |
| 557 | Y-Aib-QGT-αMeF(2F)-TSD-4Pal-αMeS-I-αMeL-LD-Orn- | 563 | 5292.9 |
| | K((γ-Glu)₂-CO—(CH₂)₁₆—CO₂H)AQ-Aib-Orn-FIe-αMeY- | | |
| | LQEGGPSSGEPPPEGTEE-NH₂ | | |
| 558 | Y-Aib-QGT-αMeF(2F)-TSD-4Pal-αMeS-I-αMeL-LD-Orn- | 564 | 5422.0 |
| | K((γ-Glu)₂-CO—(CH₂)₁₆—CO₂H)AQ-Aib-Orn-FIe-αMeY- | | |
| | LQEGGPSSGEPPPEGTEEE-NH₂ | | |
| 559 | Y-Aib-QGT-αMeF(2F)-TSD-4Pal-αMeS-I-αMeL-LD-Orn- | 565 | 5036.6 |
| | K((γ-Glu)₂-CO—(CH₂)₁₆—CO₂H)AQ-Aib-Orn-FIe-αMeY- | | |
| | LSEGGPSSGEPPPSGGE-NH₂ | | |
| 560 | Y-Aib-QGT-αMeF(2F)-TSD-4Pal-αMeS-I-αMeL-LD-Orn- | 566 | 5066.6 |
| | K((γ-Glu)₂-CO—(CH₂)₁₆—CO₂H)AQ-Aib-Orn-FIe-αMeY- | | |
| | LSEGGPSSGEPPPSGSE-NH₂ | | |
| 561 | Y-Aib-QGT-αMeF(2F)-TSD-4Pal-αMeS-I-αMeL-LD-Orn- | 567 | 5209.8 |
| | K((γ-Glu)₂-CO—(CH₂)₁₆—CO₂H)AQ-Aib-Orn-FIe-αMeY- | | |
| | LSEGGPSSGEPPPSGTEE-NH₂ | | |
| 562 | Y-Aib-QGT-αMeF(2F)-TSD-4Pal-αMeS-I-αMeL-LD-Orn- | 568 | 5338.9 |
| | K((γ-Glu)₂-CO—(CH₂)₁₆—CO₂H)AQ-Aib-Orn-FIe-αMeY- | | |
| | LSEGGPSSGEPPPSGTEEE-NH₂ | | |
| 563 | Y-Aib-QGT-αMeF(2F)-TSD-4Pal-αMeS-I-αMeL-LD-Orn- | 569 | 5080.7 |
| | K((Glu)-(γ-Glu)-CO—(CH₂)₁₆—CO₂H)AQ-Aib-Orn-FIe- | | |
| | αMeY-LSEGGPSSGEPPPSGTE-NH₂ | | |
| 564 | Y-Aib-QGT-αMeF(2F)-TSD-4Pal-αMeS-I-αMeL-LD-Orn- | 570 | 5209.8 |
| | K((Glu)-(γ-Glu)-CO—(CH₂)₁₆—CO₂H)AQ-Aib-Orn-FIe- | | |
| | αMeY-LSEGGPSSGEPPPSGTEE-NH₂ | | |
| 565 | Y-Aib-QGT-αMeF(2F)-TSD-4Pal-αMeS-I-αMeL-LD-Orn- | 571 | 5080.7 |
| | K((γ-Glu)-(Glu)-CO—(CH₂)₁₆—CO₂H)AQ-Aib-Orn-FIe- | | |
| | αMeY-LSEGGPSSGEPPPSGTE-NH₂ | | |
| 566 | Y-Aib-QGT-αMeF(2F)-TSD-4Pal-αMeS-I-αMeL-LD-Orn- | 572 | 5209.8 |
| | K((γ-Glu)-(Glu)-CO—(CH₂)₁₆—CO₂H)AQ-Aib-Orn-FIe- | | |
| | αMeY-LSEGGPSSGEPPPSGTEE-NH₂ | | |
| 567 | Y-Aib-QGT-αMeF(2F)-TSD-4Pal-αMeS-I-αMeL-LD-Orn- | 573 | 5179.8 |
| | K((γ-Glu)₂-CO—(CH₂)₁₆—CO₂H)AQ-Aib-Orn-FIe-αMeY- | | |
| | LSEGGPSSGEPPPSGAEE-NH₂ | | |
| 568 | Y-Aib-QGT-αMeF(2F)-TSD-4Pal-αMeS-I-αMeL-LD-Orn- | 574 | 5165.7 |
| | K((γ-Glu)₂-CO—(CH₂)₁₆—CO₂H)AQ-Aib-Orn-FIe-αMeY- | | |
| | LSEGGPSSGEPPPSGGEE-NH₂ | | |
| 569 | Y-Aib-QGT-αMeF(2F)-TSD-4Pal-αMeS-I-αMeL-LD-Orn- | 575 | 5195.7 |
| | K((γ-Glu)₂-CO—(CH₂)₁₆—CO₂H)AQ-Aib-Orn-FIe-αMeY- | | |
| | LSEGGPSSGEPPPSGSEE-NH₂-NH₂ | | |
| 570 | Y-Aib-QGT-αMeF(2F)-TSD-4Pal-αMeS-I-αMeL-LD-Orn- | 576 | 5236.8 |
| | K((γ-Glu)₂-CO—(CH₂)₁₆—CO₂H)AQ-Aib-Orn-FIe-αMeY- | | |
| | LSEGGPSSGEPPPSGQEE-NH₂ | | |
| 571 | Y-Aib-QGT-αMeF(2F)-TSD-4Pal-αMeS-I-αMeL-LD-Orn- | 577 | 5193.8 |
| | K((γ-Glu)₂-CO—(CH₂)₁₆—CO₂H)AQ-Aib-Orn-FIe-αMeY- | | |
| | LAEGGPSSGEPPPSGTEE-NH₂ | | |
| 572 | Y-Aib-QGT-αMeF(2F)-TSD-4Pal-αMeS-I-αMeL-LD-Orn- | 578 | 5250.8 |
| | K((γ-Glu)₂-CO—(CH₂)₁₆—CO₂H)AQ-Aib-Orn-FIe-αMeY- | | |
| | LQEGGPSSGEPPPSGTEE-NH₂ | | |
| 573 | Y-Aib-QGT-αMeF(2F)-TSD-4Pal-αMeS-I-αMeL-LD-Orn- | 579 | 5379.9 |
| | K((γ-Glu)₂-CO—(CH₂)₁₆—CO₂H)AQ-Aib-Orn-FIe-αMeY- | | |
| | LQEGGPSSGEPPPSGTEEE-NH₂ | | |
| 574 | Y-Aib-QGT-αMeF(2F)-TSD-4Pal-αMeS-ILLD-Orn-K((γ- | 580 | 5248.8 |
| | Glu)₂-CO—(CH₂)₁₆—CO₂H)AQ-Aib-Orn-FIe-αMeY- | | |
| | LQEGGPSSGEPPPEGAEE-NH₂ | | |
| 575 | Y-Aib-QGT-αMeF(2F)-TSD-4Pal-αMeS-ILLD-Orn-K((γ- | 581 | 5206.8 |
| | Glu)₂-CO—(CH₂)₁₆—CO₂H)AQ-Aib-Orn-FIe-αMeY- | | |
| | LQEGGPSSGEPPPSGAEE-NH₂ | | |
| 576 | Y-Aib-QGT-αMeF(2F)-TSD-4Pal-αMeS-ILLD-Orn-K((γ- | 582 | 5207.8 |
| | Glu)₂-CO—(CH₂)₁₆—CO₂H)AQ-Aib-Orn- | | |
| | FIeYLIEGGPSSGEPPPSGTEE-NH₂ | | |
| 577 | Y-Aib-QGT-αMeF(2F)-TSD-4Pal-αMeS-ILLD-Orn-K((γ- | 583 | 5379.0 |
| | Glu)₂-CO—(CH₂)₁₆—CO₂H)AQ-Aib-Orn- | | |
| | FIeYLIEGGPSSGEPPPEGTEEE-NH₂ | | |
| 578 | Y-Aib-QGT-αMeF(2F)-TSD-4Pal-SILLDKK((γ-Glu)₂-CO— | 584 | 5144.7 |
| | (CH₂)₁₆—CO₂H)AQ-Aib- | | |
| | AFIEWLQEGGPSSGAPPPSGTEE-NH₂ | | |
| 579 | Y-Aib-QGT-αMeF(2F)-TSD-4Pal-SILLDKK((γ-Glu)₂-CO— | 585 | 5202.7 |
| | (CH₂)₁₆—CO₂H)AQ-Aib-AFIEWLQEGGPSSGEPPPSGTEE- | | |
| | NH₂ | | |
| 580 | Y-Aib-QGT-αMeF(2F)-TSD-4Pal-SILLDKK((γ-Glu)₂-CO— | 586 | 5121.7 |
| | (CH₂)₁₆—CO₂H)AQ-Aib-AFIEYLQEGGPSSGAPPPSGTEE- | | |
| | NH₂ | | |
| 581 | Y-Aib-QGT-αMeF(2F)-TSD-4Pal-SILLD-Orn-K((γ-Glu)₂- | 587 | 5107.6 |
| | CO—(CH₂)₁₆—CO₂H)AQ-Aib- | | |
| | AFIEYLQEGGPSSGAPPPSGTEE-NH₂ | | |
| 582 | Y-Aib-QGT-αMeF(2F)-TSD-4Pal-SILLD-Orn-K((γ-Glu)₂- | 588 | 5150.7 |
| | CO—(CH₂)₁₆—CO₂H)AQ-Aib-Orn- | | |
| | FIEYLQEGGPSSGAPPPSGTEE-NH₂ | | |
| 583 | Y-Aib-QGT-αMeF(2F)-TSD-4Pal-SILLD-Orn-K((γ-Glu)₂- | 589 | 5165.7 |
| | CO—(CH₂)₁₆—CO₂H)AQ-Aib- | | |
| | AFIEYLQEGGPSSGEPPPSGTEE-NH₂ | | |
| 584 | Y-Aib-QGT-αMeF(2F)-TSD-4Pal-SILLD-Orn-K((γ-Glu)₂- | 590 | 5270.9 |
| | CO—(CH₂)₁₆—CO₂H)AQ-Me4Pal-Orn- | | |
| | FIeYLIEGGPSSGEPPPSGTEE-NH₂ | | |
| 585 | Y-Aib-QGT-αMeF(2F)-TSD-4Pal-αMeS-I-αMeL-LD-Orn- | 591 | 5278.8 |
| | K((γ-Glu)₂-CO—(CH₂)₁₆—CO₂H)AQ-Aib-Orn-FIe-αMeY- | | |
| | LQEGGPSSGEPPPEGSEE-NH₂ | | |
| 586 | Y-Aib-QGT-αMeF(2F)-TSD-4Pal-αMeS-I-αMeL-LD-Orn- | 592 | 5248.8 |
| | K((γ-Glu)₂-CO—(CH₂)₁₆—CO₂H)AQ-Aib-Orn-FIe-αMeY- | | |
| | LQEGGPSSGEPPPEGGEE-NH₂ | | |
| 587 | Y-Aib-QGT-αMeF(2F)-TSD-4Pal-αMeS-I-αMeL-LD-Orn- | 593 | 5262.8 |
| | K((γ-Glu)₂-CO—(CH₂)₁₆—CO₂H)AQ-Aib-Orn-FIe-αMeY- | | |
| | LQEGGPSSGEPPPEGAEE-NH₂ | | |
| 588 | Y-Aib-QGT-αMeF(2F)-TSD-4Pal-αMeS-I-αMeL-LD-Orn- | 594 | 5320.9 |
| | K((γ-Glu)₂-CO—(CH₂)₁₆—CO₂H)AQ-Aib-Orn-FIe-αMeY- | | |
| | LQEGGPSSGEPPPEGEEE-NH₂ | | |
| 589 | Y-Aib-QGT-αMeF(2F)-TSD-4Pal-αMeS-I-αMeL-LD-Orn- | 595 | 5179.7 |
| | K((γ-Glu)₂-CO—(CH₂)₁₆—CO₂H)AQ-Aib-Orn-FIe-αMeY- | | |
| | LAEGGPSSGEPPPSGSEE-NH₂ -NH₂ | | |
| 590 | Y-Aib-QGT-αMeF(2F)-TSD-4Pal-αMeS-I-αMeL-LD-Orn- | 596 | 5149.7 |
| | K((γ-Glu)₂-CO—(CH₂)₁₆—CO₂H)AQ-Aib-Orn-FIe-αMeY- | | |
| | LAEGGPSSGEPPPSGGEE-NH₂ | | |
| 591 | Y-Aib-QGT-αMeF(2F)-TSD-4Pal-αMeS-I-αMeL-LD-Orn- | 597 | 5163.7 |
| | K((γ-Glu)₂-CO—(CH₂)₁₆—CO₂H)AQ-Aib-Orn-FIe-αMeY- | | |
| | LAEGGPSSGEPPPSGAEE-NH₂ | | |
| 592 | Y-Aib-QGT-αMeF(2F)-TSD-4Pal-αMeS-I-αMeL-LD-Orn- | 598 | 5221.8 |
| | K((γ-Glu)₂-CO—(CH₂)₁₆—CO₂H)AQ-Aib-Orn-FIe-αMeY- | | |
| | LAEGGPSSGEPPPSGEEE-NH₂ | | |
| 593 | Y-Aib-QGT-αMeF(2F)-TSD-4Pal-αMeS-I-αMeL-LD-Orn- | 599 | 5292.9 |
| | K((Glu)-(γ-Glu)-CO—(CH₂)₁₆—CO₂H)AQ-Aib-Orn-FIe- | | |
| | αMeY-LQEGGPSSGEPPPEGTEE-NH₂ | | |
| 594 | Y-Aib-QGT-αMeF(2F)-TSD-4Pal-αMeS-I-αMeL-LD-Orn- | 600 | 5422.0 |
| | K((Glu)-(γ-Glu)-CO—(CH₂)₁₆—CO₂H)AQ-Aib-Orn-FIe- | | |
| | αMeY-LQEGGPSSGEPPPEGTEEE-NH₂ | | |
| 595 | Y-Aib-QGT-αMeF(2F)-TSD-4Pal-αMeS-I-αMeL-LD-Orn- | 601 | 5292.9 |
| | K(e-(γ-Glu)-CO—(CH₂)₁₆—CO₂H)AQ-Aib-Orn-FIe-αMeY- | | |
| | LQEGGPSSGEPPPEGTEE-NH₂ | | |
| 596 | Y-Aib-QGT-αMeF(2F)-TSD-4Pal-αMeS-I-αMeL-LD-Orn- | 602 | 5422.0 |
| | K(e-(γ-Glu)-CO—(CH₂)₁₆—CO₂H)AQ-Aib-Orn-FIe-αMeY- | | |
| | LQEGGPSSGEPPPEGTEEE-NH₂ | | |
| 597 | Y-Aib-QGT-αMeF(2F)-TSD-4Pal-αMeS-I-αMeL-LD-Orn- | 603 | 5265.8 |
| | K((γ-Glu)₂-CO—(CH₂)₁₆—CO₂H)AQ-Aib-Orn-FIe-αMeY- | | |
| | LTEGGPSSGEPPPEGTEE-NH₂ | | |
| 598 | Y-Aib-QGT-αMeF(2F)-TSD-4Pal-αMeS-I-αMeL-LD-Orn- | 604 | 5395.0 |
| | K((γ-Glu)₂-CO—(CH₂)₁₆—CO₂H)AQ-Aib-Orn-FIe-αMeY- | | |
| | LTEGGPSSGEPPPEGTEEE-NH₂ | | |
| 599 | Y-Aib-QGT-αMeF(2F)-TSD-4Pal-αMeS-I-αMeL-LD-Orn- | 605 | 5320.9 |
| | K((γ-Glu)₂-CO—(CH₂)₁₆—CO₂H)AQ-Aib-Orn-FIe-αMeY- | | |
| | LQEGGPSSGEPPPEGTEE-NH₂ | | |
| 600 | Y-Aib-QGT-αMeF(2F)-TSD-4Pal-αMeS-I-αMeL-LD-Orn- | 606 | 5450.0 |
| | K((γ-Glu)₂-CO—(CH₂)₁₆—CO₂H)AQ-Aib-Orn-FIe-αMeY- | | |
| | LQEGGPSSGEPPPEGTEEE-NH₂ | | |
| 601 | Y-Aib-QGT-αMeF(2F)-TSD-4Pal-αMeS-I-αMeL-LD-Orn- | 607 | 5293.8 |
| | K((γ-Glu)₂-CO—(CH₂)₁₆—CO₂H)AQ-Aib-Orn-FIe-αMeY- | | |
| | LQEGGPSSGEPPPEGTEE | | |
| 602 | Y-Aib-QGT-αMeF(2F)-TSD-4Pal-αMeS-I-αMeL-LD-Orn- | 608 | 5423.0 |
| | K((γ-Glu)₂-CO—(CH₂)₁₆—CO₂H)AQ-Aib-Orn-FIe-αMeY- | | |
| | LQEGGPSSGEPPPEGTEE | | |
| 603 | Y-Aib-QGT-αMeF(2F)-TSD-4Pal-αMeS-ILLD-Orn-K((γ- | 609 | 5235.8 |
| | Glu)₂-CO—(CH₂)₁₆—CO₂H)AQ-Aib-Orn- | | |
| | FIeYLIEGGPSSGEPPPEGSEE-NH₂ | | |
| 604 | Y-Aib-QGT-αMeF(2F)-TSD-4Pal-αMeS-ILLD-Orn-K((γ- | 610 | 5219.8 |
| | Glu)₂-CO—(CH₂)₁₆—CO₂H)AQ-Aib-Orn- | | |
| | FIeYLIEGGPSSGEPPPEGAEE-NH₂ | | |
| 605 | Y-Aib-QGT-αMeF(2F)-TSD-4Pal-αMeS-ILLD-Orn-K((γ- | 611 | 5205.8 |
| | Glu)₂-CO—(CH₂)₁₆—CO₂H)AQ-Aib-Orn- | | |
| | FIeYLIEGGPSSGEPPPEGGEE-NH₂ | | |
| 606 | Y-Aib-QGT-αMeF(2F)-TSD-4Pal-αMeS-ILLD-Orn-K((γ- | 612 | 5277.8 |
| | Glu)₂-CO—(CH₂)₁₆—CO₂H)AQ-Aib-Orn- | | |
| | FIeYLIEGGPSSGEPPPEGEEE-NH₂ | | |
| 607 | Y-Aib-QGT-αMeF(2F)-TSD-4Pal-SILLDKK((γ-Glu)₂-CO— | 613 | 5108.6 |
| | (CH₂)₁₆—CO₂H)AQ-Aib-AFIEYLEEGGPSSGEPPPSGTGE- | | |
| | NH₂ | | |
| 608 | Y-Aib-QGT-αMeF(2F)-TSD-4Pal-SILLDKK((γ-Glu)₂-CO— | 614 | 5180.7 |
| | (CH₂)₁₆—CO₂H)AQ-Aib-AFIEYLEEGGPSSGEPPPSGTEE- | | |
| | NH₂ | | |
| 609 | Y-Aib-QGT-αMeF(2F)-TSD-4Pal-SILLDKK((γ-Glu)₂-CO— | 615 | 5122.7 |
| | (CH₂)₁₆—CO₂H)AQ-Aib-AFIEYLEEGGPSSGAPPPSGTEE- | | |
| | NH₂ | | |
| 610 | Y-Aib-QGT-αMeF(2F)-TSD-4Pal-SILLDKK((γ-Glu)₂-CO— | 616 | 5108.6 |
| | (CH₂)₁₆—CO₂H)AQ-Aib-AFIEYLEEGGPSSGAPPPSGSEE- | | |
| | NH₂ | | |
| 611 | Y-Aib-QGT-αMeF(2F)-TSD-4Pal-SILLDKK((γ-Glu)₂-CO— | 617 | 5150.7 |
| | (CH₂)₁₆—CO₂H)AQ-Aib-AFIEYLEEGGPSSGAPPPSGEEE- | | |
| | NH₂ | | |
| 612 | Y-Aib-QGT-αMeF(2F)-TSD-4Pal-SILLDKK((γ-Glu)₂-CO— | 618 | 5078.6 |
| | (CH₂)₁₆—CO₂H)AQ-Aib-AFIEYLEEGGPSSGAPPPSGGEE- | | |
| | NH₂ | | |
| 613 | Y-Aib-QGT-αMeF(2F)-TSD-4Pal-SI-αMeL-LD-Orn-K((2- | 619 | 5186.8 |
| | [2-(2-Amino-ethoxy)-ethoxy]-acetyl)₂-(γ-Glu)-CO—(CH₂)₁₆- | | |
| | CO₂H)AQ-Me4Pal-EFIe-αMeY-LLEGGPSSGAPPPSGE- | | |
| | NH₂ | | |
| 614 | Y-Aib-QGT-αMeF(2F)-TSD-4Pal-SI-αMeL-LD-Orn-K((2- | 620 | 5041.7 |
| | [2-(2-Amino-ethoxy)-ethoxy]-acetyl)-(γ-Glu)-CO—(CH₂)₁₆- | | |
| | CO₂H)AQ-Me4Pal-EFIe-αMeY-LIEGGPSSGAPPPSGE- | | |
| | NH₂ | | |
| 615 | Y-Aib-QGT-αMeF(2F)-TSD-4Pal-SI-αMeL-LD-Orn-K((2- | 621 | 5041.7 |
| | [2-(2-Amino-ethoxy)-ethoxy]-acetyl)-(γ-Glu)-CO—(CH₂)₁₆- | | |
| | CO₂H)AQ-Me4Pal-EFIe-αMeY-LLEGGPSSGAPPPSGE- | | |
| | NH₂ | | |
| 616 | Y-Aib-QGT-αMeF(2F)-TSD-4Pal-SI-αMeL-LD-Orn-K((γ- | 622 | 5025.6 |
| | Glu)₂-CO—(CH₂)₁₆—CO₂H)AQ-Me4Pal-EFIe-αMeY- | | |
| | LIEGGPSSGAPPPSGE-NH₂ | | |
| 617 | Y-Aib-QGT-αMeF(2F)-TSD-4Pal-SI-αMeL-LD-Orn-K((γ- | 623 | 5025.6 |
| | Glu)₂-CO—(CH₂)₁₆—CO₂H)AQ-Me4Pal-EFIe-αMeY- | | |
| | LLEGGPSSGAPPPSGE-NH₂ | | |
| 618 | Y-Aib-QGT-αMeF(2F)-TSD-4Pal-SILLDKK((γ-Glu)₂-CO— | 624 | 5036.6 |
| | (CH₂)₁₆—CO₂H)AQ-Aib-AFIEYLEEGGPSSGAPPPSGSGE- | | |
| | NH₂ | | |
| 619 | Y-Aib-QGT-αMeF(2F)-TSD-4Pal-SILLDKK((γ-Glu)₂-CO— | 625 | 5006.5 |
| | (CH₂)₁₆—CO₂H)AQ-Aib-AFIEYLEEGGPSSGAPPPSGGGE- | | |
| | NH₂ | | |
| 620 | Y-Aib-QGT-αMeF(2F)-TSD-4Pal-SILLDKK((γ-Glu)₂-CO— | 626 | 5020.6 |
| | (CH₂)₁₆—CO₂H)AQ-Aib-AFIEYLEEGGPSSGAPPPSGAGE- | | |
| | NH₂ | | |
| 621 | Y-Aib-QGT-αMeF(2F)-TSD-4Pal-SILLDKK((γ-Glu)₂-CO— | 627 | 5078.6 |
| | (CH₂)₁₆—CO₂H)AQ-Aib-AFIEYLEEGGPSSGAPPPSGEGE- | | |
| | NH₂ | | |
| 622 | Y-Aib-QGT-αMeF(2F)-TSD-4Pal-SI-αMeL-LDKK((γ- | 628 | 5064.6 |
| | Glu)₂-CO—(CH₂)₁₆—CO₂H)AQ-Aib- | | |
| | AFIEYLEEGGPSSGAPPPSGTGE-NH₂ | | |
| 623 | Y-Aib-QGT-αMeF(2F)-TSD-4Pal-SI-αMeL-LDKK((γ- | 629 | 5092.6 |
| | Glu)₂-CO—(CH₂)₁₆—CO₂H)AQ-Aib- | | |
| | AFIEYLEEGGPSSGAPPPSGEGE-NH₂ | | |
| 624 | Y-Aib-QGT-αMeF(2F)-TSD-4Pal-SI-αMeL-LDKK((γ- | 630 | 5122.7 |
| | Glu)₂-CO—(CH₂)₁₆—CO₂H)AQ-Aib- | | |
| | AFIEYLEEGGPSSGEPPPSGTGE-NH₂ | | |
| 625 | Y-Aib-QGT-αMeF(2F)-TSD-4Pal-SI-αMeL-LDKK((γ- | 631 | 5150.7 |
| | Glu)₂-CO—(CH₂)₁₆—CO₂H)AQ-Aib- | | |
| | AFIEYLEEGGPSSGEPPPSGEGE-NH₂ | | |
| 626 | Y-Aib-QGT-αMeF(2F)-TSD-4Pal-SI-αMeL-LDKK((γ- | 632 | 5106.7 |
| | Glu)₂-CO—(CH₂)₁₆—CO₂H)AQ-Aib- | | |
| | AFIEYLEEGGPSSGAPPPEGTGE-NH₂ | | |
| 627 | Y-Aib-QGT-αMeF(2F)-TSD-4Pal-SI-αMeL-LDKK((γ- | 633 | 5134.7 |
| | Glu)₂-CO—(CH₂)₁₆—CO₂H)AQ-Aib- | | |
| | AFIEYLEEGGPSSGAPPPEGTGE-NH₂ | | |
| 628 | Y-Aib-QGT-αMeF(2F)-TSD-4Pal-SI-αMeL-LDKK((γ- | 634 | 5164.7 |
| | Glu)₂-CO—(CH₂)₁₆—CO₂H)AQ-Aib- | | |
| | AFIEYLEEGGPSSGEPPPEGTGE-NH₂ | | |
| 629 | Y-Aib-QGT-αMeF(2F)-TSD-4Pal-SI-αMeL-LDKK((γ- | 635 | 5192.7 |
| | Glu)₂-CO—(CH₂)₁₆—CO₂H)AQ-Aib- | | |
| | AFIEYLEEGGPSSGEPPPEGTGE-NH₂ | | |
| 630 | Y-Aib-QGT-αMeF(2F)-TSD-4Pal-SI-αMeL-LDKK((γ- | 636 | 5166.7 |
| | Glu)₂-CO—(CH₂)₁₆—CO₂H)AQ-Aib- | | |
| | AFIEYLEEGGPSSGEPPPSGSEE-NH₂ | | |
| 631 | Y-Aib-QGT-αMeF(2F)-TSD-4Pal-SI-αMeL-LDKK((γ- | 637 | 5108.6 |
| | Glu)₂-CO—(CH₂)₁₆—CO₂H)AQ-Aib- | | |
| | AFIEYLAEGGPSSGEPPPSGSEE-NH₂ | | |
| 632 | Y-Aib-QGT-αMeF(2F)-TSD-4Pal-SI-αMeL-LDKK((γ- | 638 | 5124.6 |
| | Glu)₂-CO—(CH₂)₁₆—CO₂H)AQ-Aib- | | |
| | AFIEYLSEGGPSSGEPPPSGSEE-NH₂ | | |
| 633 | Y-Aib-QGT-αMeF(2F)-TSD-4Pal-SI-αMeL-LDKK((γ- | 639 | 5138.6 |
| | Glu)₂-CO—(CH₂)₁₆—CO₂H)AQ-Aib- | | |
| | AFIEYLTEGGPSSGEPPPSGSEE-NH₂ | | |
| 634 | Y-Aib-QGT-αMeF(2F)-TSD-4Pal-SI-αMeL-LDKK((γ- | 640 | 5165.7 |
| | Glu)₂-CO—(CH₂)₁₆—CO₂H)AQ-Aib- | | |
| | AFIEYLQEGGPSSGEPPPSGSEE-NH₂ | | |
| 635 | Y-Aib-QGT-αMeF(2F)-TSD-4Pal-SI-αMeL-LDKK((γ- | 641 | 5209.7 |
| | Glu)₂-CO—(CH₂)₁₆—CO₂H)AQ-Aib-Orn- | | |
| | FIEYLEEGGPSSGEPPPSGSEE-NH₂ | | |
| 636 | Y-Aib-QGT-αMeF(2F)-TSD-4Pal-SI-αMeL-LDKK((γ- | 642 | 5151.7 |
| | Glu)₂-CO—(CH₂)₁₆—CO₂H)AQ-Aib-Orn- | | |
| | FIEYLAEGGPSSGEPPPSGSEE-NH₂ | | |
| 637 | Y-Aib-QGT-αMeF(2F)-TSD-4Pal-SI-αMeL-LDKK((γ- | 643 | 5167.7 |
| | Glu)₂-CO—(CH₂)₁₆—CO₂H)AQ-Aib-Orn- | | |
| | FIEYLSEGGPSSGEPPPSGSEE-NH₂ | | |
| 638 | Y-Aib-QGT-αMeF(2F)-TSD-4Pal-SI-αMeL-LDKK((γ- | 644 | 5181.7 |
| | Glu)₂-CO—(CH₂)₁₆—CO₂H)AQ-Aib-Orn- | | |
| | FIEYLTEGGPSSGEPPPSGSEE-NH₂ | | |
| 639 | Y-Aib-QGT-αMeF(2F)-TSD-4Pal-SI-αMeL-LDKK((γ- | 645 | 5208.7 |
| | Glu)₂-CO—(CH₂)₁₆—CO₂H)AQ-Aib-Orn- | | |
| | FIEYLQEGGPSSGEPPPSGSEE-NH₂ | | |
| 640 | Y-Aib-QGT-αMeF(2F)-TSD-4Pal-SI-αMeL-LD-Orn-K((2- | 646 | 4999.6 |
| | [2-(2-Amino-ethoxy)-ethoxy]-acetyl)-(γ-Glu)-CO—(CH₂)₁₆- | | |
| | CO₂H)AQ-Me4Pal-EFIe-αMeY-LIEGGPSSGAPPPSGS- | | |
| | NH₂ | | |
| 641 | Y-Aib-QGT-αMeF(2F)-TSD-4Pal-SI-αMeL-LD-Orn-K((2- | 647 | 4999.6 |
| | [2-(2-Amino-ethoxy)-ethoxy]-acetyl)-(γ-Glu)-CO—(CH₂)₁₆- | | |
| | CO₂H)AQ-Me4Pal-EFIe-αMeY-LLEGGPSSGAPPPSGS- | | |
| | NH₂ | | |
| 642 | Y-Aib-QGT-αMeF(2F)-TSD-4Pal-SI-αMeL-LD-Orn-K((2- | 648 | 4957.5 |
| | [2-(2-Amino-ethoxy)-ethoxy]-acetyl)-(γ-Glu)-CO—(CH₂)₁₆- | | |
| | CO₂H)AQ-Me4Pal-EFIe-αMeY-LAEGGPSSGAPPPSGS- | | |
| | NH₂ | | |
| 643 | Y-Aib-QGT-αMeF(2F)-TSD-4Pal-SI-αMeL-LD-Orn-K((2- | 649 | 5014.6 |
| | [2-(2-Amino-ethoxy)-ethoxy]-acetyl)-(γ-Glu)-CO—(CH₂)₁₆- | | |
| | CO₂H)AQ-Me4Pal-EFIe-αMeY-LQEGGPSSGAPPPSGS- | | |
| | NH₂ | | |
| 644 | Y-Aib-QGT-αMeF(2F)-TSD-4Pal-SI-αMeL-LD-Orn-K((2- | 650 | 5057.7 |
| | [2-(2-Amino-ethoxy)-ethoxy]-acetyl)-(γ-Glu)-CO—(CH₂)₁₆- | | |
| | CO₂H)AQ-Me4Pal-EFIe-αMeY-LIEGGPSSGEPPPSGS- | | |
| | NH₂ | | |
| 645 | Y-Aib-QGT-αMeF(2F)-TSD-4Pal-SI-αMeL-LD-Orn-K((2- | 651 | 5057.7 |
| | [2-(2-Amino-ethoxy)-ethoxy]-acetyl)-(γ-Glu)-CO—(CH₂)₁₆- | | |
| | CO₂H)AQ-Me4Pal-EFIe-αMeY-LLEGGPSSGEPPPSGS- | | |
| | NH₂ | | |
| 646 | Y-Aib-QGT-αMeF(2F)-TSD-4Pal-SI-αMeL-LD-Orn-K((γ- | 652 | 4941.5 |
| | Glu)₂-CO—(CH₂)₁₆—CO₂H)AQ-Me4Pal-EFIe-αMeY- | | |
| | LAEGGPSSGAPPPSGS-NH₂ | | |
| 647 | Y-Aib-QGT-αMeF(2F)-TSD-4Pal-SI-αMeL-LD-Orn-K((γ- | 653 | 4998.6 |
| | Glu)₂-CO—(CH₂)₁₆—CO₂H)AQ-Me4Pal-EFIe-αMeY- | | |
| | LQEGGPSSGAPPPSGS-NH₂ | | |
| 648 | Y-Aib-QGT-αMeF(2F)-TSD-4Pal-SI-αMeL-LD-Orn-K((2- | 654 | 5072.6 |
| | [2-(2-Amino-ethoxy)-ethoxy]-acetyl)-(γ-Glu)-CO—(CH₂)₁₆- | | |
| | CO₂H)AQ-Me4Pal-EFIe-αMeY-LQEGGPSSGEPPPSGS- | | |
| | NH₂ | | |
| 649 | Y-Aib-QGT-αMeF(2F)-TSD-4Pal-SI-αMeL-LD-Orn-K((γ- | 655 | 5056.6 |
| | Glu)₂-CO—(CH₂)₁₆—CO₂H)AQ-Me4Pal-EFIe-αMeY- | | |
| | LQEGGPSSGEPPPSGS-NH₂ | | |
| 650 | Y-Aib-QGT-αMeF(2F)-TSD-4Pal-SI-αMeL-LDKK((γ- | 656 | 5193.7 |
| | Glu)₂-CO—(CH₂)₁₆—CO₂H)AQ-Aib-Orn- | | |
| | FIEYLAEGGPSSGEPPPEGSEE-NH₂ | | |
| 651 | Y-Aib-QGT-αMeF(2F)-TSD-4Pal-SI-αMeL-LDKK((γ- | 657 | 5209.7 |
| | Glu)₂-CO—(CH₂)₁₆—CO₂H)AQ-Aib-Orn- | | |
| | FIEYLSEGGPSSGEPPPEGSEE-NH₂ | | |
| 652 | Y-Aib-QGT-αMeF(2F)-TSD-4Pal-SI-αMeL-LDKK((γ- | 658 | 5223.8 |
| | Glu)₂-CO—(CH₂)₁₆—CO₂H)AQ-Aib-Orn- | | |
| | FIEYLTEGGPSSGEPPPEGSEE-NH₂ | | |
| 653 | Y-Aib-QGT-αMeF(2F)-TSD-4Pal-SI-αMeL-LDKK((γ- | 659 | 5250.8 |
| | Glu)₂-CO—(CH₂)₁₆—CO₂H)AQ-Aib-Orn- | | |
| | FIEYLQEGGPSSGEPPPEGSEE-NH₂ | | |
| 654 | Y-Aib-QGT-αMeF(2F)-TSD-4Pal-αMeS-I-αMeL-LD-Orn- | 660 | 5305.0 |
| | K((γ-Glu)-(6-aminohexanoic acid)-CO—(CH₂)₁₆—CO₂H)AQ- | | |
| | Aib-Orn-FIe-αMeY-LQEGGPSSGEPPPEGTEE-NH₂ | | |
| 655 | Y-Aib-QGT-αMeF(2F)-TSD-4Pal-αMeS-I-αMeL-LD-Orn- | 661 | 5337.0 |
| | K((γ-Glu)-(2-[2-(2-Amino-ethoxy)-ethoxy]-acetyl)-CO— | | |
| | (CH₂)₁₆—CO₂H)AQ-Aib-Orn-FIe-αMeY- | | |
| | LQEGGPSSGEPPPEGTEE-NH₂ | | |
| 656 | Y-Aib-QGT-αMeF(2F)-TSD-4Pal-αMeS-I-αMeL-LD-Orn- | 662 | 5320.0 |
| | K((γ-Glu)-(8-Lys)-CO—(CH₂)₁₆—CO₂H)AQ-Aib-Orn-FIe- | | |
| | αMeY-LQEGGPSSGEPPPEGTEE-NH₂ | | |
| 657 | Y-Aib-QGT-αMeF(2F)-TSD-4Pal-αMeS-I-αMeL-LD-Orn- | 663 | 5320.9 |
| | K((γ-Glu)-e-CO—(CH₂)₁₆—CO₂H)AQ-Aib-Orn-FIe-αMeY- | | |
| | LQEGGPSSGEPPPEGTEE-NH₂ | | |
| 658 | Y-Aib-QGT-αMeF(2F)-TSD-4Pal-αMeS-I-αMeL-LD-Orn- | 664 | 5248.9 |
| | K((γ-Glu)-(Gly)-CO—(CH₂)₁₆—CO₂H)AQ-Aib-Orn-FIe- | | |
| | αMeY-LQEGGPSSGEPPPEGTEE-NH₂ | | |
| 659 | Y-Aib-QGT-αMeF(2F)-TSD-4Pal-SILLDKK((γ-Glu)₂-CO— | 665 | 5035.6 |
| | (CH₂)₁₆—CO₂H)AQ-Aib-AFIEYLEEGGPSSGAPPPEGTE- | | |
| | NH₂ | | |
| 660 | Y-Aib-QGT-αMeF(2F)-TSD-4Pal-SILLDKK((γ-Glu)₂-CO— | 666 | 5092.6 |
| | (CH₂)₁₆—CO₂H)AQ-Aib-AFIEYLEEGGPSSGAPPPEGTGE- | | |
| | NH₂ | | |
| 661 | Y-Aib-QGT-αMeF(2F)-TSD-4Pal-SILLDKK((γ-Glu)₂-CO— | 667 | 5064.6 |
| | (CH₂)₁₆—CO₂H)AQ-Aib- | | |
| | AFIEYLAadEGGPSSGAPPPSGTGE-NH₂ | | |
| 662 | Y-Aib-QGT-αMeF(2F)-TSD-4Pal-SILLDKK((2-[2-(2- | 668 | 5066.6 |
| | Amino-ethoxy)-ethoxy]-acetyl)-(γ-Glu)-CO—(CH₂)₁₆- | | |
| | CO₂H)AQ-Aib-AFIEYLEEGGPSSGAPPPSGTGE-NH₂ | | |
| 663 | Y-Aib-QGT-αMeF(2F)-TSD-4Pal-SILLDKK((2-[2-(2- | 669 | 5080.7 |
| | Amino-ethoxy)-ethoxy]-acetyl)-(γ-Glu)-CO—(CH₂)₁₆- | | |
| | CO₂H)AQ-Aib-AFIEYLAadEGGPSSGAPPPSGTGE-NH₂ | | |
| 664 | Y-Aib-QGT-αMeF(2F)-TSD-4Pal-SILLDKK((γ-Glu)₂-CO— | 670 | 5064.6 |
| | (CH₂)₁₆—CO₂H)AQ-Aib-AFIE-αMeY- | | |
| | LEEGGPSSGAPPPSGTGE-NH₂ | | |
| 665 | Y-Aib-QGT-αMeF(2F)-TSD-4Pal-SILLD-Orn-K((γ-Glu)₂- | 671 | 5050.6 |
| | CO—(CH₂)₁₆—CO₂H)AQ-Aib-AFIE-αMeY- | | |
| | LEEGGPSSGAPPPSGTGE-NH₂ | | |
| 666 | Y-Aib-QGT-αMeF(2F)-TSD-4Pal-SILLDKK((γ-Glu)₂-CO— | 672 | 5050.6 |
| | (CH₂)₁₆—CO₂H)AQ-Aib-AFIE-αMeY- | | |
| | LEEGGPSSGAPPPSGSGE-NH₂ | | |
| 667 | Y-Aib-QGT-αMeF(2F)-TSD-4Pal-SILLDKK((γ-Glu)₂-CO— | 673 | 5092.6 |
| | (CH₂)₁₆—CO₂H)AQ-Aib-AFIE-αMeY- | | |
| | LEEGGPSSGAPPPSGEGE-NH₂ | | |
| 668 | Y-Aib-QGT-αMeF(2F)-TSD-4Pal-SILLDKK((γ-Glu)₂-CO— | 674 | 5020.6 |
| | (CH₂)₁₆—CO₂H)AQ-Aib-AFIE-αMeY- | | |
| | LEEGGPSSGAPPPSGGGE-NH₂ | | |
| 669 | Y-Aib-QGT-αMeF(2F)-TSD-4Pal-SILLDKK((2-[2-(2- | 675 | 5080.7 |
| | Amino-ethoxy)-ethoxy]-acetyl)-(γ-Glu)-CO—(CH₂)₁₆- | | |
| | CO₂H)AQ-Aib-AFIE-αMeY-LEEGGPSSGAPPPSGTGE- | | |
| | NH₂ | | |
| 670 | Y-Aib-QGT-αMeF(2F)-TSD-4Pal-SILLD-Orn-K((2-[2-(2- | 676 | 4985.6 |
| | Amino-ethoxy)-ethoxy]-acetyl)-(γ-Glu)-CO—(CH₂)₁₆- | | |
| | CO₂H)AQ-Me4Pal-EFIe-αMeY-LLEGGPSSGAPPPSGE | | |
| 671 | Y-Aib-QGT-αMeF(2F)-TSD-4Pal-αMeS-I-αMeL-LD-Orn- | 677 | 4879.5 |
| | K((2-[2-(2-Amino-ethoxy)-ethoxy]-acetyl)-(γ-Glu)-CO— | | |
| | (CH₂)₁₆—CO₂H)AA-Aib-EFIe-αMeY- | | |
| | LIEGGPSSGAPPPSGS-NH₂ | | |
| 672 | Y-Aib-QGT-αMeF(2F)-TSD-4Pal-αMeS-I-αMeL-LD-Orn- | 678 | 4879.5 |
| | K((2-[2-(2-Amino-ethoxy)-ethoxy]-acetyl)-(γ-Glu)-CO— | | |
| | (CH₂)₁₆—CO₂H)AA-Aib-EFIe-αMeY- | | |
| | LLEGGPSSGAPPPSGS-NH₂ | | |
| 673 | Y-Aib-QGT-αMeF(2F)-TSD-4Pal-αMeS-I-αMeL-LD-Orn- | 679 | 4863.5 |
| | K((γ-Glu)₂-CO—(CH₂)₁₆—CO₂H)AA-Aib-EFIe-αMeY- | | |
| | LIEGGPSSGAPPPSGS-NH₂ | | |
| 674 | Y-Aib-QGT-αMeF(2F)-TSD-4Pal-SILLD-Orn-K((γ-Glu)₂- | 680 | 5093.7 |
| | CO—(CH₂)₁₆—CO₂H)AQ-Aib-Orn-FIE-αMeY- | | |
| | LEEGGPSSGAPPPSGTGE-NH₂ | | |
| 675 | Y-Aib-QGT-αMeF(2F)-TSD-4Pal-SI-αMeL-LD-Orn-K((2- | 681 | 5126.8 |
| | [2-(2-Amino-ethoxy)-ethoxy]-acetyl)-(γ-Glu)-CO—(CH₂)₁₆- | | |
| | CO₂H)AQ-Me4Pal-Orn-FIe-αMeY-LIEGGPSSGEPPPEGE- | | |
| | NH₂ | | |
| 676 | Y-Aib-QGT-αMeF(2F)-TSD-4Pal-SI-αMeL-LD-Orn-K((2- | 682 | 5140.8 |
| | [2-(2-Amino-ethoxy)-ethoxy]-acetyl)-(γ-Glu)-CO—(CH₂)₁₆- | | |
| | CO₂H)AQ-Me4Pal-Orn-FIe-αMeY-LIEGGPSSGEPPPEAE- | | |
| | NH₂ | | |
| 677 | Y-Aib-QGT-αMeF(2F)-TSD-4Pal-SI-αMeL-LD-Orn-K((2- | 683 | 5156.8 |
| | [2-(2-Amino-ethoxy)-ethoxy]-acetyl)-(γ-Glu)-CO—(CH₂)₁₆- | | |
| | CO₂H)AQ-Me4Pal-Orn-FIe-αMeY-LIEGGPSSGEPPPESE- | | |
| | NH₂ | | |
| 678 | Y-Aib-QGT-αMeF(2F)-TSD-4Pal-SI-αMeL-LD-Orn-K((2- | 684 | 5170.8 |
| | [2-(2-Amino-ethoxy)-ethoxy]-acetyl)-(γ-Glu)-CO—(CH₂)₁₆- | | |
| | CO₂H)AQ-Me4Pal-Orn-FIe-αMeY-LIEGGPSSGEPPPETE- | | |
| | NH₂ | | |
| 679 | Y-Aib-QGT-αMeF(2F)-TSD-4Pal-SI-αMeL-LD-Orn-K((2- | 685 | 5227.9 |
| | [2-(2-Amino-ethoxy)-ethoxy]-acetyl)-(γ-Glu)-CO—(CH₂)₁₆- | | |
| | CO₂H)AQ-Me4Pal-Orn-FIe-αMeY- | | |
| | LIEGGPSSGEPPPEGTE-NH₂ | | |
| 680 | Y-Aib-QGT-αMeF(2F)-TSD-4Pal-SI-αMeL-LD-Orn-K((2- | 686 | 5284.9 |
| | [2-(2-Amino-ethoxy)-ethoxy]-acetyl)-(γ-Glu)-CO—(CH₂)₁₆- | | |
| | CO₂H)AQ-Me4Pal-Orn-FIe-αMeY- | | |
| | LIEGGPSSGEPPPEGTGE-NH₂ | | |
| 681 | Y-Aib-QGT-αMeF(2F)-TSD-4Pal-SI-αMeL-LD-Orn-K((γ- | 687 | 5110.7 |
| | Glu)₂-CO—(CH₂)₁₆—CO₂H)AQ-Me4Pal-Orn-FIe-αMeY- | | |
| | LIEGGPSSGEPPPEEG-NH₂ | | |
| 682 | Y-Aib-QGT-αMeF(2F)-TSD-4Pal-SI-αMeL-LD-Orn-K((γ- | 688 | 5068.7 |
| | Glu)₂-CO—(CH₂)₁₆—CO₂H)AQ-Me4Pal-Orn-FIe-αMeY- | | |
| | LIEGGPSSGEPPPSGE-NH₂ | | |
| 683 | Y-Aib-QGT-αMeF(2F)-TSD-4Pal-SI-αMeL-LD-Orn-K((γ- | 689 | 5110.7 |
| | Glu)₂-CO—(CH₂)₁₆—CO₂H)AQ-Me4Pal-Orn-FIe-αMeY- | | |
| | LIEGGPSSGEPPPEGE-NH₂ | | |
| 684 | Y-Aib-QGT-αMeF(2F)-TSD-4Pal-SI-αMeL-LD-Orn-K((γ- | 690 | 5124.8 |
| | Glu)₂-CO—(CH₂)₁₆—CO₂H)AQ-Me4Pal-Orn-FIe-αMeY- | | |
| | LIEGGPSSGEPPPEAE-NH₂ | | |
| 685 | Y-Aib-QGT-αMeF(2F)-TSD-4Pal-SI-αMeL-LD-Orn-K((γ- | 691 | 5140.8 |
| | Glu)₂-CO—(CH₂)₁₆—CO₂H)AQ-Me4Pal-Orn-FIe-αMeY- | | |
| | LIEGGPSSGEPPPESE-NH₂ | | |
| 686 | Y-Aib-QGT-αMeF(2F)-TSD-4Pal-SI-αMeL-LD-Orn-K((γ- | 692 | 5154.8 |
| | Glu)₂-CO—(CH₂)₁₆—CO₂H)AQ-Me4Pal-Orn-FIe-αMeY- | | |
| | LIEGGPSSGEPPPETE-NH₂ | | |
| 687 | Y-Aib-QGT-αMeF(2F)-TSD-4Pal-SI-αMeL-LD-Orn-K((γ- | 693 | 5211.8 |
| | Glu)₂-CO—(CH₂)₁₆—CO₂H)AQ-Me4Pal-Orn-FIe-αMeY- | | |
| | LIEGGPSSGEPPPEGTE | | |
| 688 | Y-Aib-QGT-αMeF(2F)-TSD-4Pal-SI-αMeL-LD-Orn-K((γ- | 694 | 5268.9 |
| | Glu)₂-CO—(CH₂)₁₆—CO₂H)AQ-Me4Pal-Orn-FIe-αMeY- | | |
| | LIEGGPSSGEPPPEGTGE-NH₂ | | |
| 689 | Y-Aib-QGT-αMeF(2F)-TSD-4Pal-αMeS-I-αMeL-LD-Orn- | 695 | 5079.7 |
| | K((2-[2-(2-Amino-ethoxy)-ethoxy]-acetyl)-(γ-Glu)-CO— | | |
| | (CH₂)₁₆—CO₂H)AA-Aib-EFIe-αMeY- | | |
| | LIEGGPSSGAPPPSGTGE-NH₂ | | |
| 690 | Y-Aib-QGT-αMeF(2F)-TSD-4Pal-αMeS-I-αMeL-LD-Orn- | 696 | 5063.7 |
| | K((γ-Glu)₂-CO—(CH₂)₁₆—CO₂H)AA-Aib-EFIe-αMeY- | | |
| | LIEGGPSSGAPPPSGTGE-NH₂ | | |
| 691 | Y-Aib-QGT-αMeF(2F)-TSD-4Pal-SI-αMeL-LD-Orn-K((2- | 697 | 5227.9 |
| | [2-(2-Amino-ethoxy)-ethoxy]-acetyl)-(γ-Glu)-CO—(CH₂)₁₆- | | |
| | CO₂H)AQ-Me4Pal-Orn-FIe-αMeY- | | |
| | LIEGGPSSGEPPPEGTe-NH₂ | | |
| 692 | Y-Aib-QGT-αMeF(2F)-TSD-4Pal-SI-αMeL-LD-Orn-K((2- | 698 | 5284.9 |
| | [2-(2-Amino-ethoxy)-ethoxy]-acetyl)-(γ-Glu)-CO—(CH₂)₁₆- | | |
| | CO₂H)AQ-Me4Pal-Orn-FIe-αMeY- | | |
| | LIEGGPSSGEPPPEGEGe-NH₂ | | |
| 693 | Y-Aib-QGT-αMeF(2F)-TSD-4Pal-αMeS-I-αMeL-LD-Orn- | 699 | 4865.5 |
| | K((2-[2-(2-Amino-ethoxy)-ethoxy]-acetyl)-(γ-Glu)-CO— | | |
| | (CH₂)₁₆—CO₂H)AA-Aib-EFIe-αMeY- | | |
| | LVEGGPSSGAPPPSGS-NH₂ | | |
| 694 | Y-Aib-QGT-αMeF(2F)-TSD-4Pal-αMeS-I-αMeL-LD-Orn- | 700 | 4999.6 |
| | K((2-[2-(2-Amino-ethoxy)-ethoxy]-acetyl)-(γ-Glu)-CO— | | |
| | (CH₂)₁₆—CO₂H)AQ-Me4Pal-EFIe-αMeY- | | |
| | LVEGGPSSGAPPPSGS-NH₂ | | |
| 695 | Y-Aib-QGT-αMeF(2F)-TSD-4Pal-αMeS-I-αMeL-LD-Orn- | 701 | 4907.5 |
| | K((γ-Glu)₂-CO—(CH₂)₁₆—CO₂H)AA-Aib-EFIe-αMeY- | | |
| | LVEGGPSSGEPPPSGS-NH₂ | | |
| 696 | Y-Aib-QGT-αMeF(2F)-TSD-4Pal-αMeS-I-αMeL-LD-Orn- | 702 | 4983.6 |
| | K((γ-Glu)₂-CO—(CH₂)₁₆—CO₂H)AQ-Me4Pal-EFIe-αMeY- | | |
| | LVEGGPSSGAPPPSGS-NH₂ | | |
| 697 | Y-Aib-QGT-αMeF(2F)-TSD-4Pal-αMeS-I-αMeL-LD-Orn- | 703 | 5221.9 |
| | K((2-[2-(2-Amino-ethoxy)-ethoxy]-acetyl)-(γ-Glu)-CO— | | |
| | (CH₂)₁₆—CO₂H)AQ-Aib-Orn-FIe-αMeY- | | |
| | LIEGGPSSGEPPPEGTGE-NH₂ | | |
| 698 | Y-Aib-QGT-αMeF(2F)-TSD-4Pal-αMeS-I-αMeL-LD-Orn- | 704 | 5063.7 |
| | K((2-[2-(2-Amino-ethoxy)-ethoxy]-acetyl)-(γ-Glu)-CO— | | |
| | (CH₂)₁₆—CO₂H)AQ-Aib-Orn-FIe-αMeY- | | |
| | LIEGGPSSGEPPPEGE-NH₂ | | |
| 699 | Y-Aib-QGT-αMeF(2F)-TSD-4Pal-αMeS-I-αMeL-LD-Orn- | 705 | 5013.7 |
| | K((2-[2-(2-Amino-ethoxy)-ethoxy]-acetyl)-(γ-Glu)-CO— | | |
| | (CH₂)₁₆—CO₂H)AQ-Me4Pal-EFIe-αMeY- | | |
| | LIEGGPSSGAPPPSGS-NH₂ | | |
| 700 | Y-Aib-QGT-αMeF(2F)-TSD-4Pal-αMeS-I-αMeL-LD-Orn- | 706 | 4997.6 |
| | K((γ-Glu)₂-CO—(CH₂)₁₆—CO₂H)AQ-Me4Pal-EFIe-αMeY- | | |
| | LIEGGPSSGAPPPSGS-NH₂ | | |
| 701 | Y-Aib-QGT-αMeF(2F)-TSD-4Pal-αMeS-I-αMeL-LD-Orn- | 707 | 4921.6 |
| | K((2-[2-(2-Amino-ethoxy)-ethoxy]-acetyl)-(γ-Glu)-CO— | | |
| | (CH₂)₁₆—CO₂H)AA-Aib-EFIe-αMeY- | | |
| | LIEGGPSSGAPPPSGE-NH₂ | | |
| 702 | Y-Aib-QGT-αMeF(2F)-TSD-4Pal-αMeS-I-αMeL-LD-Orn- | 708 | 5008.6 |
| | K((2-[2-(2-Amino-ethoxy)-ethoxy]-acetyl)-(γ-Glu)-CO— | | |
| | (CH₂)₁₆—CO₂H)AA-Aib-EFIe-αMeY- | | |
| | LIEGGPSSGAPPPSGSE-NH₂ | | |
| 703 | Y-Aib-QGT-αMeF(2F)-TSD-4Pal-αMeS-I-αMeL-LD-Orn- | 709 | 5022.7 |
| | K((2-[2-(2-Amino-ethoxy)-ethoxy]-acetyl)-(γ-Glu)-CO— | | |
| | (CH₂)₁₆—CO₂H)AA-Aib-EFIe-αMeY- | | |
| | LIEGGPSSGAPPPSGEE-NH₂ | | |
| 704 | Y-Aib-QGT-αMeF(2F)-TSD-4Pal-αMeS-I-αMeL-LD-Orn- | 710 | 5137.7 |
| | K((2-[2-(2-Amino-ethoxy)-ethoxy]-acetyl)-(γ-Glu)-CO— | | |
| | (CH₂)₁₆—CO₂H)AA-Aib-EFIe-αMeY- | | |
| | LIEGGPSSGAPPPSGSEE-NH₂ | | |
| 705 | Y-Aib-QGT-αMeF(2F)-TSD-4Pal-αMeS-I-αMeL-LD-Orn- | 711 | 5151.8 |
| | K((2-[2-(2-Amino-ethoxy)-ethoxy]-acetyl)-(γ-Glu)-CO— | | |
| | (CH₂)₁₆—CO₂H)AA-Aib-EFIe-αMeY- | | |
| | LIEGGPSSGAPPPSGEEE-NH₂ | | |
| 706 | Y-Aib-QGT-αMeF(2F)-TSD-4Pal-SI-αMeL-LD-Orn-K((2- | 712 | 5042.7 |
| | [2-(2-Amino-ethoxy)-ethoxy]-acetyl)-(γ-Glu)-CO—(CH₂)₁₆- | | |
| | CO₂H)AQ-Me4Pal-Orn-FIe-αMeY-LIEGGPSSGEPPPSGS- | | |
| | NH₂ | | |
| 707 | Y-Aib-QGT-αMeF(2F)-TSD-4Pal-αMeS-I-αMeL-LD-Orn- | 713 | 4937.6 |
| | K((2-[2-(2-Amino-ethoxy)-ethoxy]-acetyl)-(γ-Glu)-CO— | | |
| | (CH₂)₁₆—CO₂H)AA-Aib-EFIe-αMeY- | | |
| | LIEGGPSSGEPPPSGS-NH₂ | | |
| 708 | Y-Aib-QGT-αMeF(2F)-TSD-4Pal-αMeS-I-αMeL-LD-Orn- | 714 | 4921.5 |
| | K((γ-Glu)₂-CO—(CH₂)₁₆—CO₂H)AA-Aib-EFIe-αMeY- | | |
| | LIEGGPSSGAPPPSGS-NH₂ | | |
| 709 | Y-Aib-QGT-αMeF(2F)-TSD-4Pal-αMeS-I-αMeL-LD-Orn- | 715 | 5121.7 |
| | K((γ-Glu)₂-CO—(CH₂)₁₆—CO₂H)AA-Aib-EFIe-αMeY- | | |
| | LIEGGPSSGAPPPSGTGE-NH₂ | | |
| 710 | Y-Aib-QGT-αMeF(2F)-TSD-4Pal-αMeS-I-αMeL-LD-Orn- | 716 | 5071.7 |
| | K((2-[2-(2-Amino-ethoxy)-ethoxy]-acetyl)-(γ-Glu)-CO— | | |
| | (CH₂)₁₆—CO₂H)AQ-Me4Pal-EFIe-αMeY- | | |
| | LIEGGPSSGEPPPSGS-NH₂ | | |
| 711 | Y-Aib-QGT-αMeF(2F)-TSD-4Pal-αMeS-I-αMeL-LD-Orn- | 717 | 5271.9 |
| | K((2-[2-(2-Amino-ethoxy)-ethoxy]-acetyl)-(γ-Glu)-CO— | | |
| | (CH₂)₁₆—CO₂H)AQ-Me4Pal-EFIe-αMeY- | | |
| | LIEGGPSSGEPPPSGTGE-NH₂ | | |
| 712 | Y-Aib-QGT-αMeF(2F)-TSD-4Pal-αMeS-I-αMeL-LD-Orn- | 718 | 5142.8 |
| | K((2-[2-(2-Amino-ethoxy)-ethoxy]-acetyl)-(γ-Glu)-CO— | | |
| | (CH₂)₁₆—CO₂H)AQ-Me4Pal-EFIe-αMeY- | | |
| | LIEGGPSSGAPPPSGSE-NH₂ | | |
| 713 | Y-Aib-QGT-αMeF(2F)-TSD-4Pal-αMeS-I-αMeL-LD-Orn- | 719 | 5271.9 |
| | K((2-[2-(2-Amino-ethoxy)-ethoxy]-acetyl)-(γ-Glu)-CO— | | |
| | (CH₂)₁₆—CO₂H)AQ-Me4Pal-EFIe-αMeY- | | |
| | LIEGGPSSGAPPPSGSEE-NH₂ | | |
| 714 | Y-Aib-QGT-αMeF(2F)-TSD-4Pal-αMeS-I-αMeL-LD-Orn- | 720 | 5213.9 |
| | K((2-[2-(2-Amino-ethoxy)-ethoxy]-acetyl)-(γ-Glu)-CO— | | |
| | (CH₂)₁₆—CO₂H)AQ-Me4Pal-EFIe-αMeY- | | |
| | LIEGGPSSGAPPPSGTGE-NH₂ | | |
| 715 | Y-Aib-QGT-αMeF(2F)-TSD-4Pal-αMeS-I-αMeL-LD-Orn- | 721 | 5055.7 |
| | K((γ-Glu)₂-CO—(CH₂)₁₆—CO₂H)AQ-Me4Pal-EFIe-αMeY- | | |
| | LIEGGPSSGEPPPSGS-NH₂ | | |
| 716 | Y-Aib-QGT-αMeF(2F)-TSD-4Pal-αMeS-I-αMeL-LD-Orn- | 722 | 5184.8 |
| | K((γ-Glu)₂-CO—(CH₂)₁₆—CO₂H)AQ-Me4Pal-EFIe-αMeY- | | |
| | LIEGGPSSGEPPPSGSE-NH₂ | | |
| 717 | Y-Aib-QGT-αMeF(2F)-TSD-4Pal-αMeS-I-αMeL-LD-Orn- | 723 | 5126.7 |
| | K((γ-Glu)₂-CO—(CH₂)₁₆—CO₂H)AQ-Me4Pal-EFIe-αMeY- | | |
| | LIEGGPSSGAPPPSGSE-NH₂ | | |
| 718 | Y-Aib-QGT-αMeF(2F)-TSD-4Pal-αMeS-I-αMeL-LD-Orn- | 724 | 5197.8 |
| | K((γ-Glu)₂-CO—(CH₂)₁₆—CO₂H)AQ-Me4Pal-EFIe-αMeY- | | |
| | LIEGGPSSGAPPPSGTGE-NH₂ | | |
| 719 | Y-Aib-QGT-αMeF(2F)-TSD-4Pal-αMeS-I-αMeL-LD-Orn- | 725 | 5022.7 |
| | K((2-[2-(2-Amino-ethoxy)-ethoxy]-acetyl)-(γ-Glu)-CO— | | |
| | (CH₂)₁₆—CO₂H)AA-Aib-EFIe-αMeY- | | |
| | LIEGGPSSGEPPPSGTE-NH₂ | | |
| 720 | Y-Aib-QGT-αMeF(2F)-TSD-4Pal-αMeS-I-αMeL-LD-Orn- | 726 | 5022.7 |
| | K((2-[2-(2-Amino-ethoxy)-ethoxy]-acetyl)-(γ-Glu)-CO— | | |
| | (CH₂)₁₆—CO₂H)AA-Aib-EFIe-αMeY- | | |
| | LIEGGPSSGEPPPSGSe-NH₂ | | |
| 721 | Y-Aib-QGT-αMeF(2F)-TSD-4Pal-αMeS-I-αMeL-LD-Orn- | 727 | 4921.6 |
| | K((2-[2-(2-Amino-ethoxy)-ethoxy]-acetyl)-(γ-Glu)-CO— | | |
| | (CH₂)₁₆—CO₂H)AA-Aib-EFIe-αMeY- | | |
| | LIEGGPSSGAPPPSGe-NH₂ | | |
| 722 | Y-Aib-QGT-αMeF(2F)-TSD-4Pal-αMeS-I-αMeL-LD-Orn- | 728 | 4921.6 |
| | K((2-[2-(2-Amino-ethoxy)-ethoxy]-acetyl)-(γ-Glu)-CO— | | |
| | (CH₂)₁₆—CO₂H)AA-Aib-EFIe-αMeY-LIEGGPSSGAPPPSG- | | |
| | YE-NH₂ | | |
| 723 | Y-Aib-QGT-αMeF(2F)-TSD-4Pal-αMeS-I-αMeL-LD-Orn- | 729 | 5079.7 |
| | K((2-[2-(2-Amino-ethoxy)-ethoxy]-acetyl)-(γ-Glu)-CO— | | |
| | (CH₂)₁₆—CO₂H)AA-Aib-EFIe-αMeY- | | |
| | LIEGGPSSGAPPPSGTGe-NH₂ | | |
| 724 | Y-Aib-QGT-αMeF(2F)-TSD-4Pal-αMeS-I-αMeL-LD-Orn- | 730 | 5079.7 |
| | K((2-[2-(2-Amino-ethoxy)-ethoxy]-acetyl)-(γ-Glu)-CO— | | |
| | (CH₂)₁₆—CO₂H)AA-Aib-EFIe-αMeY- | | |
| | LIEGGPSSGAPPPSGTG-yE-NH₂ | | |
| 725 | Y-Aib-QGT-αMeF(2F)-TSD-4Pal-αMeS-I-αMeL-LD-Orn- | 731 | 5151.8 |
| | K((2-[2-(2-Amino-ethoxy)-ethoxy]-acetyl)-(γ-Glu)-CO— | | |
| | (CH₂)₁₆—CO₂H)AA-Aib-EFIe-αMeY- | | |
| | LIEGGPSSGAPPPSGTEE-NH₂ | | |
| 726 | Y-Aib-QGT-αMeF(2F)-TSD-4Pal-αMeS-I-αMeL-LD-Orn- | 732 | 5151.8 |
| | K((2-[2-(2-Amino-ethoxy)-ethoxy]-acetyl)-(γ-Glu)-CO— | | |
| | (CH₂)₁₆—CO₂H)AA-Aib-EFIe-αMeY- | | |
| | LIEGGPSSGAPPPSGTE-γE-NH₂ | | |
| 727 | Y-Aib-QGT-αMeF(2F)-TSD-4Pal-SI-αMeL-LD-Orn-K((2- | 733 | 5112.7 |
| | [2-(2-Amino-ethoxy)-ethoxy]-acetyl)-(γ-Glu)-CO—(CH₂)₁₆- | | |
| | CO₂H)AQ-Me4Pal-Orn-FIe-αMeY-LIEGGPSSGDPPPEGE- | | |
| | NH₂ | | |
| 728 | Y-Aib-QGT-αMeF(2F)-TSD-4Pal-SI-αMeL-LD-Orn-K((2- | 734 | 5126.8 |
| | [2-(2-Amino-ethoxy)-ethoxy]-acetyl)-(γ-Glu)-CO—(CH₂)₁₆- | | |
| | CO₂H)AQ-Me4Pal-Orn-FIe-αMeY-LIEGGPSSGDPPPEAE- | | |
| | NH₂ | | |
| 729 | Y-Aib-QGT-αMeF(2F)-TSD-4Pal-SI-αMeL-LD-Orn-K((2- | 735 | 5142.8 |
| | [2-(2-Amino-ethoxy)-ethoxy]-acetyl)-(γ-Glu)-CO—(CH₂)₁₆- | | |
| | CO₂H)AQ-Me4Pal-Orn-FIe-αMeY-LIEGGPSSGDPPPESE- | | |
| | NH₂ | | |
| 730 | Y-Aib-QGT-αMeF(2F)-TSD-4Pal-SI-αMeL-LD-Orn-K((2- | 736 | 5156.8 |
| | [2-(2-Amino-ethoxy)-ethoxy]-acetyl)-(γ-Glu)-CO—(CH₂)₁₆- | | |
| | CO₂H)AQ-Me4Pal-Orn-FIe-αMeY-LIEGGPSSGDPPPETE- | | |
| | NH₂ | | |
| 731 | Y-Aib-QGT-αMeF(2F)-TSD-4Pal-SI-αMeL-LD-Orn-K((2- | 737 | 5213.9 |
| | [2-(2-Amino-ethoxy)-ethoxy]-acetyl)-(γ-Glu)-CO—(CH₂)₁₆- | | |
| | CO₂H)AQ-Me4Pal-Orn-FIe-αMeY- | | |
| | LIEGGPSSGDPPPEGTE-NH₂ | | |
| 732 | Y-Aib-QGT-αMeF(2F)-TSD-4Pal-SI-αMeL-LD-Orn-K((2- | 738 | 5270.9 |
| | [2-(2-Amino-ethoxy)-ethoxy]-acetyl)-(γ-Glu)-CO—(CH₂)₁₆- | | |
| | CO₂H)AQ-Me4Pal-Orn-FIe-αMeY- | | |
| | LIEGGPSSGDPPPEGTGE-NH₂ | | |
| 733 | Y-Aib-QGT-αMeF(2F)-TSD-4Pal-αMeS-I-αMeL-LD-Orn- | 739 | 5057.7 |
| | K((2-[2-(2-Amino-ethoxy)-ethoxy]-acetyl)-(γ-Glu)-CO— | | |
| | (CH₂)₁₆—CO₂H)AQ-Me4Pal-EFIe-αMeY- | | |
| | LVEGGPSSGEPPPSGS-NH₂ | | |
| 734 | Y-Aib-QGT-αMeF(2F)-TSD-4Pal-αMeS-I-αMeL-LD-Orn- | 740 | 5257.9 |
| | K((2-[2-(2-Amino-ethoxy)-ethoxy]-acetyl)-(γ-Glu)-CO— | | |
| | (CH₂)₁₆—CO₂H)AQ-Me4Pal-EFIe-αMeY- | | |
| | LVEGGPSSGEPPPSGTGE-NH₂ | | |
| 735 | Y-Aib-QGT-αMeF(2F)-TSD-4Pal-αMeS-I-αMeL-LD-Orn- | 741 | 5213.8 |
| | K((2-[2-(2-Amino-ethoxy)-ethoxy]-acetyl)-(γ-Glu)-CO— | | |
| | (CH₂)₁₆—CO₂H)AQ-Me4Pal-EFIe-αMeY- | | |
| | LVEGGPSSGEPPPSGGGE-NH₂ | | |
| 736 | Y-Aib-QGT-αMeF(2F)-TSD-4Pal-αMeS-I-αMeL-LD-Orn- | 742 | 5315.9 |
| | K((2-[2-(2-Amino-ethoxy)-ethoxy]-acetyl)-(γ-Glu)-CO— | | |
| | (CH₂)₁₆—CO₂H)AQ-Me4Pal-EFIe-αMeY- | | |
| | LVEGGPSSGEPPPSGSEE-NH₂ | | |
| 737 | Y-Aib-QGT-αMeF(2F)-TSD-4Pal-αMeS-I-αMeL-LD-Orn- | 743 | 5041.6 |
| | K((γ-Glu)₂-CO—(CH₂)₁₆—CO₂H)AQ-Me4Pal-EFIe-αMeY- | | |
| | LVEGGPSSGEPPPSGS-NH₂ | | |
| 738 | Y-Aib-QGT-αMeF(2F)-TSD-4Pal-αMeS-I-αMeL-LD-Orn- | 744 | 5241.8 |
| | K((γ-Glu)₂-CO—(CH₂)₁₆—CO₂H)AQ-Me4Pal-EFIe-αMeY- | | |
| | LVEGGPSSGEPPPSGTGE-NH₂ | | |
| 739 | Y-Aib-QGT-αMeF(2F)-TSD-4Pal-αMeS-I-αMeL-LD-Orn- | 745 | 5197.8 |
| | K((γ-Glu)₂-CO—(CH₂)₁₆—CO₂H)AQ-Me4Pal-EFIe-αMeY- | | |
| | LVEGGPSSGEPPPSGGGE-NH₂ | | |
| 740 | Y-Aib-QGT-αMeF(2F)-TSD-4Pal-αMeS-I-αMeL-LD-Orn- | 746 | 5299.9 |
| | K((γ-Glu)₂-CO—(CH₂)₁₆—CO₂H)AQ-Me4Pal-EFIe-αMeY- | | |
| | LVEGGPSSGEPPPSGSEE-NH₂ | | |
| 741 | Y-Aib-QGT-αMeF(2F)-TSD-4Pal-αMeS-I-αMeL-LD-Orn- | 747 | 5169.8 |
| | K((2-[2-(2-Amino-ethoxy)-ethoxy]-acetyl)-(γ-Glu)-CO— | | |
| | (CH₂)₁₆—CO₂H)AQ-Me4Pal-EFIe-αMeY- | | |
| | LIEGGPSSGAPPPSGGGE-NH₂ | | |
| 742 | Y-Aib-QGT-αMeF(2F)-TSD-4Pal-αMeS-I-αMeL-LD-Orn- | 748 | 5227.8 |
| | K((2-[2-(2-Amino-ethoxy)-ethoxy]-acetyl)-(γ-Glu)-CO— | | |
| | (CH₂)₁₆—CO₂H)AQ-Me4Pal-EFIe-αMeY- | | |
| | LIEGGPSSGEPPPSGGGE-NH₂ | | |
| 743 | Y-Aib-QGT-αMeF(2F)-TSD-4Pal-αMeS-I-αMeL-LD-Orn- | 749 | 5153.8 |
| | K((γ-Glu)₂-CO—(CH₂)₁₆—CO₂H)AQ-Me4Pal-EFIe-αMeY- | | |
| | LIEGGPSSGAPPPSGGGE-NH₂ | | |
| 744 | Y-Aib-QGT-αMeF(2F)-TSD-4Pal-αMeS-I-αMeL-LD-Orn- | 750 | 5211.8 |
| | K((γ-Glu)₂-CO—(CH₂)₁₆—CO₂H)AQ-Me4Pal-EFIe-αMeY- | | |
| | LIEGGPSSGEPPPSGGGE-NH₂ | | |
| 745 | Y-Aib-QGT-αMeF(2F)-TSD-4Pal-αMeS-I-αMeL-LD-Orn- | 751 | 5035.7 |
| | K((2-[2-(2-Amino-ethoxy)-ethoxy]-acetyl)-(γ-Glu)-CO— | | |
| | (CH₂)₁₆—CO₂H)AA-Aib-EFIe-αMeY- | | |
| | LIEGGPSSGAPPPSGGGE-NH₂ | | |
| 746 | Y-Aib-QGT-αMeF(2F)-TSD-4Pal-αMeS-I-αMeL-LD-Orn- | 752 | 5093.7 |
| | K((2-[2-(2-Amino-ethoxy)-ethoxy]-acetyl)-(γ-Glu)-CO— | | |
| | (CH₂)₁₆—CO₂H)AA-Aib-EFIe-αMeY- | | |
| | LIEGGPSSGEPPPSGGGE-NH₂ | | |
| 747 | Y-Aib-QGT-αMeF(2F)-TSD-4Pal-αMeS-I-αMeL-LD-Orn- | 753 | 5019.6 |
| | K((γ-Glu)₂-CO—(CH₂)₁₆—CO₂H)AA-Aib-EFIe-αMeY- | | |
| | LIEGGPSSGAPPPSGGGE-NH₂ | | |
| 748 | Y-Aib-QGT-αMeF(2F)-TSD-4Pal-αMeS-I-αMeL-LD-Orn- | 754 | 5077.7 |
| | K((γ-Glu)₂-CO—(CH₂)₁₆—CO₂H)AA-Aib-EFIe-αMeY- | | |
| | LIEGGPSSGEPPPSGGGE-NH₂ | | |
| 749 | Y-Aib-QGT-αMeF(2F)-TSD-4Pal-αMeS-I-αMeL-LD-Orn- | 755 | 5041.7 |
| | K((2-[2-(2-Amino-ethoxy)-ethoxy]-acetyl)-(γ-Glu)-CO— | | |
| | (CH₂)₁₆—CO₂H)AQ-Me4Pal-EFIe-αMeY- | | |
| | LVEGGPSSGAPPPSGE-NH₂ | | |
| 750 | Y-Aib-QGT-αMeF(2F)-TSD-4Pal-αMeS-I-αMeL-LD-Orn- | 756 | 5099.7 |
| | K((2-[2-(2-Amino-ethoxy)-ethoxy]-acetyl)-(γ-Glu)-CO— | | |
| | (CH₂)₁₆—CO₂H)AQ-Me4Pal-EFIe-αMeY- | | |
| | LVEGGPSSGEPPPSGE-NH₂ | | |
| 751 | Y-Aib-QGT-αMeF(2F)-TSD-4Pal-αMeS-I-αMeL-LD-Orn- | 757 | 5128.7 |
| | K((2-[2-(2-Amino-ethoxy)-ethoxy]-acetyl)-(γ-Glu)-CO— | | |
| | (CH₂)₁₆—CO₂H)AQ-Me4Pal-EFIe-αMeY- | | |
| | LVEGGPSSGAPPPSGSE-NH₂ | | |
| 752 | Y-Aib-QGT-αMeF(2F)-TSD-4Pal-αMeS-I-αMeL-LD-Orn- | 758 | 5186.8 |
| | K((2-[2-(2-Amino-ethoxy)-ethoxy]-acetyl)-(γ-Glu)-CO— | | |
| | (CH₂)₁₆—CO₂H)AQ-Me4Pal-EFIe-αMeY- | | |
| | LVEGGPSSGEPPPSGSE-NH₂ | | |
| 753 | Y-Aib-QGT-αMeF(2F)-TSD-4Pal-SI-αMeL-LD-Orn-K((2- | 759 | 5285.9 |
| | [2-(2-Amino-ethoxy)-ethoxy]-acetyl)-(γ-Glu)-CO—(CH₂)₁₆- | | |
| | CO₂H)AQ-Me4Pal-Orn-FIe-αMeY- | | |
| | LIEGGPSSGEPPPESEE-NH₂ | | |
| 754 | Y-Aib-QGT-αMeF(2F)-TSD-4Pal-SI-αMeL-LD-Orn-K((2- | 760 | 5343.0 |
| | [2-(2-Amino-ethoxy)-ethoxy]-acetyl)-(γ-Glu)-CO—(CH₂)₁₆- | | |
| | CO₂H)AQ-Me4Pal-Orn-FIe-αMeY- | | |
| | LIEGGPSSGEPPPESEEE-NH₂ | | |
| 755 | Y-Aib-QGT-αMeF(2F)-TSD-4Pal-SI-αMeL-LD-Orn-K((2- | 761 | 5098.8 |
| | [2-(2-Amino-ethoxy)-ethoxy]-acetyl)-(γ-Glu)-CO—(CH₂)₁₆- | | |
| | CO₂H)AQ-Me4Pal-Orn-FIe-αMeY-LIEGGPSSGAPPPESE- | | |
| | NH₂ | | |
| 756 | Y-Aib-QGT-αMeF(2F)-TSD-4Pal-SI-αMeL-LD-Orn-K((2- | 762 | 5227.9 |
| | [2-(2-Amino-ethoxy)-ethoxy]-acetyl)-(γ-Glu)-CO—(CH₂)₁₆- | | |
| | CO₂H)AQ-Me4Pal-Orn-FIe-αMeY- | | |
| | LIEGGPSSGAPPPESEE-NH₂ | | |
| 757 | Y-Aib-QGT-αMeF(2F)-TSD-4Pal-SI-αMeL-LD-Orn-K((2- | 763 | 5240.9 |
| | [2-(2-Amino-ethoxy)-ethoxy]-acetyl)-(γ-Glu)-CO—(CH₂)₁₆- | | |
| | CO₂H)AQ-Me4Pal-Orn-FIe-αMeY- | | |
| | LIEGGPSSGEPPPEGGGE-NH₂ | | |
| 758 | Y-Aib-QGT-αMeF(2F)-TSD-4Pal-SI-αMeL-LD-Orn-K((2- | 764 | 5182.8 |
| | [2-(2-Amino-ethoxy)-ethoxy]-acetyl)-(γ-Glu)-CO—(CH₂)₁₆- | | |
| | CO₂H)AQ-Me4Pal-Orn-FIe-αMeY- | | |
| | LIEGGPSSGAPPPEGGGE-NH₂ | | |
| 759 | Y-Aib-QGT-αMeF(2F)-TSD-4Pal-αMeS-I-αMeL-LD-Orn- | 765 | 5211.8 |
| | K((2-[2-(2-Amino-ethoxy)-ethoxy]-acetyl)-(γ-Glu)-CO— | | |
| | (CH₂)₁₆—CO₂H)AQ-Me4Pal-EFIe-αMeY- | | |
| | LIEGGPSSGAPPPEGGGE-NH₂ | | |
| 760 | Y-Aib-QGT-αMeF(2F)-TSD-4Pal-αMeS-I-αMeL-LD-Orn- | 766 | 5269.9 |
| | K((2-[2-(2-Amino-ethoxy)-ethoxy]-acetyl)-(γ-Glu)-CO— | | |
| | (CH₂)₁₆—CO₂H)AQ-Me4Pal-EFIe-αMeY- | | |
| | LIEGGPSSGEPPPEGGGE-NH₂ | | |
| 761 | Y-Aib-QGT-αMeF(2F)-TSD-4Pal-αMeS-I-αMeL-LD-Orn- | 767 | 5195.8 |
| | K((γ-Glu)₂-CO—(CH₂)₁₆—CO₂H)AQ-Me4Pal-EFIe-αMeY- | | |
| | LIEGGPSSGAPPPEGGGE-NH₂ | | |
| 762 | Y-Aib-QGT-αMeF(2F)-TSD-4Pal-αMeS-I-αMeL-LD-Orn- | 768 | 5253.8 |
| | K((γ-Glu)₂-CO—(CH₂)₁₆—CO₂H)AQ-Me4Pal-EFIe-αMeY- | | |
| | LIEGGPSSGEPPPEGGGE-NH₂ | | |
| 763 | Y-Aib-QGT-αMeF(2F)-TSD-4Pal-αMeS-I-αMeL-LD-Orn- | 769 | 5313.9 |
| | K((2-[2-(2-Amino-ethoxy)-ethoxy]-acetyl)-(γ-Glu)-CO— | | |
| | (CH₂)₁₆—CO₂H)AQ-Me4Pal-EFIe-αMeY- | | |
| | LIEGGPSSGEPPPEGTGE-NH₂ | | |
| 764 | Y-Aib-QGT-αMeF(2F)-TSD-4Pal-αMeS-I-αMeL-LD-Orn- | 770 | 5239.8 |
| | K((γ-Glu)₂-CO—(CH₂)₁₆—CO₂H)AQ-Me4Pal-EFIe-αMeY- | | |
| | LIEGGPSSGAPPPEGTGE-NH₂ | | |
| 765 | Y-Aib-QaT-αMeF(2F)-TSD-4Pal-SI-αMeL-LD-Orn-K((2- | 771 | 5170.8 |
| | [2-(2-Amino-ethoxy)-ethoxy]-acetyl)-(γ-Glu)-CO—(CH₂)₁₆- | | |
| | CO₂H)AQ-Me4Pal-Orn-FIe-αMeY-LIEGGPSSGEPPPESE- | | |
| | NH₂ | | |
| 766 | Y-Aib-QaT-αMeF(2F)-TSD-4Pal-αMeS-I-αMeL-LD-Orn- | 772 | 5285.9 |
| | K((2-[2-(2-Amino-ethoxy)-ethoxy]-acetyl)-(γ-Glu)-CO— | | |
| | (CH₂)₁₆—CO₂H)AQ-Me4Pal-EFIe-αMeY- | | |
| | LIEGGPSSGEPPPSGTGE-NH₂ | | |
| 767 | Y-Aib-QGT-αMeF(2F)-TSD-4Pal-αMeS-I-αMeL-LD-Orn- | 773 | 5091.7 |
| | K((2-[2-(2-Amino-ethoxy)-ethoxy]-acetyl)-(γ-Glu)-CO— | | |
| | (CH₂)₁₆—CO₂H)YQ-Me4Pal-EFIe-αMeY- | | |
| | LVEGGPSSGAPPPSGS-NH₂ | | |
| 768 | Y-Aib-QGT-αMeF(2F)-TSD-4Pal-αMeS-I-αMeL-LE-Orn- | 774 | 5013.7 |
| | K((2-[2-(2-Amino-ethoxy)-ethoxy]-acetyl)-(γ-Glu)-CO— | | |
| | (CH₂)₁₆—CO₂H)AQ-Me4Pal-EFIe-αMeY- | | |
| | LVEGGPSSGAPPPSGS-NH₂ | | |
| 769 | Y-Aib-QGT-αMeF(2F)-TSD-4Pal-αMeS-I-αMeL-LD-Orn- | 775 | 5155.8 |
| | K((2-[2-(2-Amino-ethoxy)-ethoxy]-acetyl)-(γ-Glu)-CO— | | |
| | (CH₂)₁₆—CO₂H)AQ-Me4Pal-EFIe-αMeY- | | |
| | LVEGGPSSGAPPPSGGGE-NH₂ | | |
| 770 | Y-Aib-QGTFTSDFS-Orn-αMeL-LDKK((γ-Glu)₂-CO— | 776 | 4814.4 |
| | (CH₂)₁₆—CO₂H)AQ-Aib-AFIEYLLEGGPSS-Aib- | | |
| | APPPGGS-NH₂ | | |
| 771 | Y-Aib-QGTFTSDFS-Orn-αMeL-LDKK((γ-Glu)₂-CO— | 777 | 4800.37 |
| | (CH₂)₁₆—CO₂H)AQ-Aib-AFIEYLLEGGPSSG-Aib- | | |
| | PPPGGS-NH₂ | | |
| 772 | Y-Aib-QGTFTSDFSQ-αMeL-LDKK((2-[2-(2-Amino- | 778 | 4830.4 |
| | ethoxy)-ethoxy]-acetyl)-(γ-Glu)-CO—(CH₂)₁₆—CO₂H)AQ- | | |
| | Aib-AFIEYLLAGGPSSGAPPPEGS-NH₂ | | |
| 773 | Y-Aib-QGTFTSDFSQ-αMeL-LDKK((2-[2-(2-Amino- | 779 | 4846.4 |
| | ethoxy)-ethoxy]-acetyl)-(γ-Glu)-CO—(CH₂)₁₆—CO₂H)AQ- | | |
| | Aib-AFIEYLLAGGPSSGEPPPSGS-NH₂ | | |
| 774 | Y-Aib-QGTFTSDFSQ-αMeL-LDKK((2-[2-(2-Amino- | 780 | 4911.5 |
| | ethoxy)-ethoxy]-acetyl)-(γ-Glu)-CO—(CH₂)₁₆—CO₂H)AQ- | | |
| | Aib-AFIEWLLEGGPSSGAPPPEGS-NH₂ | | |
| 775 | Y-Aib-QGTFTSDFSQ-αMeL-LDKK((2-[2-(2-Amino- | 781 | 4860.4 |
| | ethoxy)-ethoxy]-acetyl)-(γ-Glu)-CO—(CH₂)₁₆—CO₂H)AQ- | | |
| | Aib-AFIEYLLEaGPSSGAPPPSGS-NH₂ | | |
| 776 | Y-Aib-QGTFTSDFSQ-αMeL-LDKK((2-[2-(2-Amino- | 782 | 4874.5 |
| | ethoxy)-ethoxy]-acetyl)-(γ-Glu)-CO—(CH₂)₁₆—CO₂H)AQ- | | |
| | Aib-AFIEYLLEaGPSSGAPPPSGT-NH₂ | | |
| 777 | Y-Aib-QGTFTSDFSQ-αMeL-LDKK((2-[2-(2-Amino- | 783 | 4921.5 |
| | ethoxy)-ethoxy]-acetyl)-(γ-Glu)-CO—(CH₂)₁₆—CO₂H)AQ- | | |
| | Aib-AFIEYLLEaGPSSGAPPPSG-4Pal-NH₂ | | |
| 778 | Y-Aib-QGTFTSDFSQ-αMeL-LDKK((2-[2-(2-Amino- | 784 | 4875.4 |
| | ethoxy)-ethoxy]-acetyl)-(γ-Glu)-CO—(CH₂)₁₆—CO₂H)AQ- | | |
| | Aib-AFIEYLLEaGPSSGAPPPSGT | | |
| 779 | Y-Aib-QGTFTSDFSQ-αMeL-LDKK((2-[2-(2-Amino- | 785 | 4902.5 |
| | ethoxy)-ethoxy]-acetyl)-(γ-Glu)-CO—(CH₂)₁₆—CO₂H)AQ- | | |
| | Aib-AFIEYLLEaGPSS-Aib-APPPSGT-NH₂ | | |
| 780 | Y-Aib-QGTFTSDFSQ-αMeL-LDKK((2-[2-(2-Amino- | 786 | 4903.5 |
| | ethoxy)-ethoxy]-acetyl)-(γ-Glu)-CO—(CH₂)₁₆—CO₂H)AQ- | | |
| | Aib-AFIEYLLEaGPSS-Aib-APPPSGT | | |
| 781 | Y-Aib-QGTFTSDFSQ-αMeL-LDKK((2-[2-(2-Amino- | 787 | 4888.5 |
| | ethoxy)-ethoxy]-acetyl)-(γ-Glu)-CO—(CH₂)₁₆—CO₂H)AQ- | | |
| | Aib-AFIEYLLE-Aib-GPSSGAPPPSGT-NH₂ | | |
| 782 | Y-Aib-QGTFTSDFSQ-αMeL-LDKK((2-[2-(2-Amino- | 788 | 4935.5 |
| | ethoxy)-ethoxy]-acetyl)-(γ-Glu)-CO—(CH₂)₁₆—CO₂H)AQ- | | |
| | Aib-AFIEYLLE-Aib-GPSSGAPPPSG-4Pal-NH₂ | | |
| 783 | Y-Aib-QGTFTSDFSQ-αMeL-LDKK((2-[2-(2-Amino- | 789 | 4889.5 |
| | ethoxy)-ethoxy]-acetyl)-(γ-Glu)-CO—(CH₂)₁₆—CO₂H)AQ- | | |
| | Aib-AFIEYLLE-Aib-GPSSGAPPPSGT | | |
| 784 | Y-Aib-QGTFTSDFSQ-αMeL-LDKK((γ-Glu)₂-CO—(CH₂)₁₆- | 790 | 4858.4 |
| | CO₂H)AQ-Aib-AFIEYLLE-Aib-GPSSGAPPPSGS-NH₂ | | |
| 785 | Y-Aib-QGTFTSDFSQ-αMeL-LDKK((2-[2-(2-Amino- | 791 | 4920.5 |
| | ethoxy)-ethoxy]-acetyl)-(γ-Glu)-CO—(CH₂)₁₆—CO₂H)AQ- | | |
| | Aib-AFIEYLLE-Aib-GESSGAPPPSGT-NH₂ | | |
| 786 | Y-Aib-QGTFTSDFSQ-αMeL-LDKK((2-[2-(2-Amino- | 792 | 4921.5 |
| | ethoxy)-ethoxy]-acetyl)-(γ-Glu)-CO—(CH₂)₁₆—CO₂H)AQ- | | |
| | Aib-AFIEYLLE-Aib-GESSGAPPPSGT | | |
| 787 | Y-Aib-QGTFTSDFSQ-αMeL-LDKK((2-[2-(2-Amino- | 793 | 5051.6 |
| | ethoxy)-ethoxy]-acetyl)₂-(γ-Glu)-CO—(CH₂)₁₆—CO₂H)AQ- | | |
| | Aib-AFIEYLLE-Aib-GESSGAPPPSGS-NH₂ | | |
| 788 | Y-Aib-QGTFTSDFSQ-αMeL-LDKK((2-[2-(2-Amino- | 794 | 4964.5 |
| | ethoxy)-ethoxy]-acetyl)-(γ-Glu)-CO—(CH₂)₁₆—CO₂H)AQ- | | |
| | Aib-AFIEYLLE-Aib-GESSGEPPPSGS-NH₂ | | |
| 789 | Y-Aib-QGTFTSDFSQ-αMeL-LDKK((2-[2-(2-Amino- | 795 | 4948.5 |
| | ethoxy)-ethoxy]-acetyl)-(γ-Glu)-CO—(CH₂)₁₆—CO₂H)AQ- | | |
| | Aib-AFIEYLLE-Aib-GESSGAPPPSGE-NH₂ | | |
| 790 | Y-Aib-QGTFTSDFSQ-αMeL-LDKK((2-[2-(2-Amino- | 796 | 5006.5 |
| | ethoxy)-ethoxy]-acetyl)-(γ-Glu)-CO—(CH₂)₁₆—CO₂H)AQ- | | |
| | Aib-AFIEYLLE-Aib-GESSGEPPPSGE-NH₂ | | |
| 791 | Y-Aib-QGTFTSD-4Pal-S-Orn-αMeL-LDKK((2-[2-(2- | 797 | 4942.5 |
| | Amino-ethoxy)-ethoxy]-acetyl)-(γ-Glu)-CO—(CH₂)₁₆- | | |
| | CO₂H)AQ-Me4Pal-AFIEYLIEGGESSGAPPPSGS-NH₂ | | |
| 792 | Y-Aib-QGTFTSD-4Pal-SR-αMeL-LDKK((2-[2-(2-Amino- | 798 | 4984.5 |
| | ethoxy)-ethoxy]-acetyl)-(γ-Glu)-CO—(CH₂)₁₆—CO₂H)AQ- | | |
| | Me4Pal-AFIEYLIEGGESSGAPPPSGS-NH₂ | | |
| 793 | Y-Aib-QGTFTSD-4Pal-SQ-αMeL-LDKK((2-[2-(2-Amino- | 799 | 4956.5 |
| | ethoxy)-ethoxy]-acetyl)-(γ-Glu)-CO—(CH₂)₁₆—CO₂H)AQ- | | |
| | Me4Pal-AFIEYLIEGGESSGAPPPSGS-NH₂ | | |
| 794 | Y-Aib-QGTFTSDFSR-αMeL-LDKK((2-[2-(2-Amino- | 800 | 4983.5 |
| | ethoxy)-ethoxy]-acetyl)-(γ-Glu)-CO—(CH₂)₁₆—CO₂H)AQ- | | |
| | Me4Pal-AFIEYLIEGGESSGAPPPSGS-NH₂ | | |
| 795 | Y-Aib-QGTFTSDFSQ-αMeL-LDKK((2-[2-(2-Amino- | 801 | 4955.5 |
| | ethoxy)-ethoxy]-acetyl)-(γ-Glu)-CO—(CH₂)₁₆—CO₂H)AQ- | | |
| | Me4Pal-AFIEYLIEGGESSGAPPPSGS-NH₂ | | |
| 796 | Y-Aib-QGTFTSDFS-Orn-αMeL-LDKK((2-[2-(2-Amino- | 802 | 4860.5 |
| | ethoxy)-ethoxy]-acetyl)-(γ-Glu)-CO—(CH₂)₁₆—CO₂H)AQ- | | |
| | Aib-AFIEYLIE-Aib-GPSSGAPPPSGS-NH₂ | | |
| 797 | Y-Aib-QGTFTSDFSK-αMeL-LDKK((2-[2-(2-Amino- | 803 | 4874.5 |
| | ethoxy)-ethoxy]-acetyl)-(γ-Glu)-CO—(CH₂)₁₆—CO₂H)AQ- | | |
| | Aib-AFIEYLIE-Aib-GPSSGAPPPSGS-NH₂ | | |
| 798 | Y-Aib-QGTFTSDFSR-αMeL-LDKK((2-[2-(2-Amino- | 804 | 4902.5 |
| | ethoxy)-ethoxy]-acetyl)-(γ-Glu)-CO—(CH₂)₁₆—CO₂H)AQ- | | |
| | Aib-AFIEYLIE-Aib-GPSSGAPPPSGS-NH₂ | | |
| 799 | Y-Aib-QGTFTSDFSDab-αMeL-LDKK((2-[2-(2-Amino- | 805 | 4846.4 |
| | ethoxy)-ethoxy]-acetyl)-(γ-Glu)-CO—(CH₂)₁₆—CO₂H)AQ- | | |
| | Aib-AFIEYLIE-Aib-GPSSGAPPPSGS-NH₂ | | |
| 800 | Y-Aib-QGTFTSDFSDap-αMeL-LDKK((2-[2-(2-Amino- | 806 | 4832.4 |
| | ethoxy)-ethoxy]-acetyl)-(γ-Glu)-CO—(CH₂)₁₆—CO₂H)AQ- | | |
| | Aib-AFIEYLIE-Aib-GPSSGAPPPSGS-NH₂ | | |
| 801 | Y-Aib-QGTFTSD-4Pal-SK-αMeL-LDKK((2-[2-(2-Amino- | 807 | 4875.5 |
| | ethoxy)-ethoxy]-acetyl)-(γ-Glu)-CO—(CH₂)₁₆—CO₂H)AQ- | | |
| | Aib-AFIEYLIE-Aib-GPSSGAPPPSGS-NH₂ | | |
| 802 | Y-Aib-QGTFTSD-4Pal-SR-αMeL-LDKK((2-[2-(2-Amino- | 808 | 4903.5 |
| | ethoxy)-ethoxy]-acetyl)-(γ-Glu)-CO—(CH₂)₁₆—CO₂H)AQ- | | |
| | Aib-AFIEYLIE-Aib-GPSSGAPPPSGS-NH₂ | | |
| 803 | Y-Aib-QGTFTSD-4Pal-SDab-αMeL-LDKK((2-[2-(2- | 809 | 4847.4 |
| | Amino-ethoxy)-ethoxy]-acetyl)-(γ-Glu)-CO—(CH₂)₁₆- | | |
| | CO₂H)AQ-Aib-AFIEYLIE-Aib-GPSSGAPPPSGS-NH₂ | | |
| 804 | Y-Aib-QGTFTSDFS-Orn-αMeL-LDKK((2-[2-(2-Amino- | 810 | 4890.5 |
| | ethoxy)-ethoxy]-acetyl)-(γ-Glu)-CO—(CH₂)₁₆—CO₂H)AQ- | | |
| | Aib-AFIEYLIE-Aib-SPSSGAPPPSGS-NH₂ | | |
| 805 | Y-Aib-QGTFTSDFSK-αMeL-LDKK((2-[2-(2-Amino- | 811 | 4904.5 |
| | ethoxy)-ethoxy]-acetyl)-(γ-Glu)-CO—(CH₂)₁₆—CO₂H)AQ- | | |
| | Aib-AFIEYLIE-Aib-SPSSGAPPPSGS-NH₂ | | |
| 806 | Y-Aib-QGTFTSDFSR-αMeL-LDKK((2-[2-(2-Amino- | 812 | 4932.5 |
| | ethoxy)-ethoxy]-acetyl)-(γ-Glu)-CO—(CH₂)₁₆—CO₂H)AQ- | | |
| | Aib-AFIEYLIE-Aib-SPSSGAPPPSGS-NH₂ | | |
| 807 | Y-Aib-QGTFTSD-4Pal-SR-αMeL-LDKK((2-[2-(2-Amino- | 813 | 4933.5 |
| | ethoxy)-ethoxy]-acetyl)-(γ-Glu)-CO—(CH₂)₁₆—CO₂H)AQ- | | |
| | Aib-AFIEYLIE-Aib-SPSSGAPPPSGS-NH₂ | | |
| 808 | Y-Aib-QGTFTSD-4Pal-S-Orn-αMeL-LDKK((2-[2-(2- | 814 | 4938.5 |
| | Amino-ethoxy)-ethoxy]-acetyl)-(γ-Glu)-CO—(CH₂)₁₆- | | |
| | CO₂H)AQ-Me4Pal-AFIEYLIE-Aib-GPSSGAPPPSGS-NH₂ | | |
| 809 | Y-Aib-QGTFTSD-4Pal-SR-αMeL-LDKK((2-[2-(2-Amino- | 815 | 4980.6 |
| | ethoxy)-ethoxy]-acetyl)-(γ-Glu)-CO—(CH₂)₁₆—CO₂H)AQ- | | |
| | Me4Pal-AFIEYLIE-Aib-GPSSGAPPPSGS-NH₂ | | |
| 810 | Y-Aib-QGTFTSD-4Pal-SQ-αMeL-LDKK((2-[2-(2-Amino- | 816 | 4952.5 |
| | ethoxy)-ethoxy]-acetyl)-(γ-Glu)-CO—(CH₂)₁₆—CO₂H)AQ- | | |
| | Me4Pal-AFIEYLIE-Aib-GPSSGAPPPSGS-NH₂ | | |
| 811 | Y-Aib-QGTFTSDFS-Orn-αMeL-LDKK((2-[2-(2-Amino- | 817 | 4937.6 |
| | ethoxy)-ethoxy]-acetyl)-(γ-Glu)-CO—(CH₂)₁₆—CO₂H)AQ- | | |
| | Me4Pal-AFIEYLIE-Aib-GPSSGAPPPSGS-NH₂ | | |
| 812 | Y-Aib-QGTFTSDFSR-αMeL-LDKK((2-[2-(2-Amino- | 818 | 4979.6 |
| | ethoxy)-ethoxy]-acetyl)-(γ-Glu)-CO—(CH₂)₁₆—CO₂H)AQ- | | |
| | Me4Pal-AFIEYLIE-Aib-GPSSGAPPPSGS-NH₂ | | |
| 813 | Y-Aib-QGTFTSDFSQ-αMeL-LDKK((2-[2-(2-Amino- | 819 | 4951.5 |
| | ethoxy)-ethoxy]-acetyl)-(γ-Glu)-CO—(CH₂)₁₆—CO₂H)AQ- | | |
| | Me4Pal-AFIEYLIE-Aib-GPSSGAPPPSGS-NH₂ | | |
| 814 | Y-Aib-QGTFTSD-4Pal-S-Orn-αMeL-LDKK((2-[2-(2- | 820 | 5083.7 |
| | Amino-ethoxy)-ethoxy]-acetyl)₂-(γ-Glu)-CO—(CH₂)₁₆- | | |
| | CO₂H)AQ-Me4Pal-AFIEYLIE-Aib-GPSSGAPPPSGS-NH₂ | | |
| 815 | Y-Aib-QGTFTSD-4Pal-SR-αMeL-LDKK((2-[2-(2-Amino- | 821 | 5125.7 |
| | ethoxy)-ethoxy]-acetyl)₂-(γ-Glu)-CO—(CH₂)₁₆—CO₂H)AQ- | | |
| | Me4Pal-AFIEYLIE-Aib-GPSSGAPPPSGS-NH₂ | | |
| 816 | Y-Aib-QGTFTSD-4Pal-SQ-αMeL-LDKK((2-[2-(2-Amino- | 822 | 5097.7 |
| | ethoxy)-ethoxy]-acetyl)₂-(γ-Glu)-CO—(CH₂)₁₆—CO₂H)AQ- | | |
| | Me4Pal-AFIEYLIE-Aib-GPSSGAPPPSGS-NH₂ | | |
| 817 | Y-Aib-QGTFTSDFSQ-αMeL-LDKK((2-[2-(2-Amino- | 823 | 5096.7 |
| | ethoxy)-ethoxy]-acetyl)₂-(γ-Glu)-CO—(CH₂)₁₆—CO₂H)AQ- | | |
| | Me4Pal-AFIEYLIE-Aib-GPSSGAPPPSGS-NH₂ | | |
| 818 | Y-Aib-QGTFTSDFSQ-αMeL-LD-Orn-K((2-[2-(2-Amino- | 824 | 4937.5 |
| | ethoxy)-ethoxy]-acetyl)-(γ-Glu)-CO—(CH₂)₁₆—CO₂H)AQ- | | |
| | Me4Pal-AFIEYLIE-Aib-GPSSGAPPPSGS-NH₂ | | |
| 819 | Y-Aib-QGTFTSDFSQ-αMeL-LDKK((2-[2-(2-Amino- | 825 | 4935.5 |
| | ethoxy)-ethoxy]-acetyl)-(γ-Glu)₂-CO—(CH₂)₁₆—CO₂H)AQ- | | |
| | Me4Pal-AFIEYLIE-Aib-GPSSGAPPPSGS-NH₂ | | |
| 820 | Y-Aib-QGTFTSD-4Pal-SQ-αMeL-LDKK((2-[2-(2-Amino- | 826 | 4861.4 |
| | ethoxy)-ethoxy]-acetyl)-(γ-Glu)-CO—(CH₂)₁₆—CO₂H)AQ- | | |
| | Aib-AFIEYLLEaGPSSGAPPPSGS-NH₂ | | |
| 821 | Y-Aib-QGTFTSD-4Pal-SQ-αMeL-LDK-((2-[2-(2-Amino- | 827 | 4875.4 |
| | ethoxy)-ethoxy]-acetyl)-(γ-Glu)-CO—(CH₂)₁₆—CO₂H)AQ- | | |
| | Aib-AFIEYLLEaGPSSGAPPPSGT-NH₂ | | |
| 822 | Y-Aib-QGTFTSD-4Pal-SQ-αMeL-LDKK((2-[2-(2-Amino- | 828 | 4922.5 |
| | ethoxy)-ethoxy]-acetyl)-(γ-Glu)-CO—(CH₂)₁₆—CO₂H)AQ- | | |
| | Aib-AFIEYLLEaGPSSGAPPPSG-4Pal-NH₂ | | |
| 823 | Y-Aib-QGTFTSD-4Pal-SQ-αMeL-LDKK((2-[2-(2-Amino- | 829 | 4876.4 |
| | ethoxy)-ethoxy]-acetyl)-(γ-Glu)-CO—(CH₂)₁₆—CO₂H)AQ- | | |
| | Aib-AFIEYLLEaGPSSGAPPPSGT | | |
| 824 | Y-Aib-QGTFTSD-4Pal-SQ-αMeL-LDKK((2-[2-(2-Amino- | 830 | 4903.5 |
| | ethoxy)-ethoxy]-acetyl)-(γ-Glu)-CO—(CH₂)₁₆—CO₂H)AQ- | | |
| | Aib-AFIEYLLEaGPSS-Aib-APPPSGT | | |
| 825 | Y-Aib-QGTFTSD-4Pal-SQ-αMeL-LDKK((2-[2-(2-Amino- | 831 | 4904.5 |
| | ethoxy)-ethoxy]-acetyl)-(γ-Glu)-CO—(CH₂)₁₆—CO₂H)AQ- | | |
| | Aib-AFIEYLLEaGPSS-Aib-APPPSGT | | |
| 826 | Y-Aib-QGTFTSD-4Pal-SQ-αMeL-LDKK((2-[2-(2-Amino- | 832 | 4924.5 |
| | ethoxy)-ethoxy]-acetyl)-(γ-Glu)-CO—(CH₂)₁₆—CO₂H)AQ- | | |
| | Me4Pal-AFIEYLIEGGPSSGAPPPSGS-NH₂ | | |
| 827 | Y-Aib-QGTFTSD-4Pal-SQ-αMeL-LDKK((2-[2-(2-Amino- | 833 | 4866.4 |
| | ethoxy)-ethoxy]-acetyl)-(γ-Glu)-CO—(CH₂)₁₆—CO₂H)AQ- | | |
| | Me4Pal-AFIEYLIAGGPSSGAPPPSGS-NH₂ | | |
| 828 | Y-Aib-QGTFTSD-4Pal-SQ-αMeL-LDKK((2-[2-(2-Amino- | 834 | 4924.5 |
| | ethoxy)-ethoxy]-acetyl)-(γ-Glu)-CO—(CH₂)₁₆—CO₂H)AQ- | | |
| | Me4Pal-AFIEYLIAGGPSSGEPPPSGS-NH₂ | | |
| 829 | Y-Aib-QGTFTSD-4Pal-SQ-αMeL-LDKK((2-[2-(2-Amino- | 835 | 4938.5 |
| | ethoxy)-ethoxy]-acetyl)-(γ-Glu)-CO—(CH₂)₁₆—CO₂H)AQ- | | |
| | Me4Pal-AFIEYLIEaGPSSGAPPPSGS-NH₂ | | |
| 830 | Y-Aib-QGTFTSD-4Pal-SQ-αMeL-LDKK((2-[2-(2-Amino- | 836 | 4947.5 |
| | ethoxy)-ethoxy]-acetyl)-(γ-Glu)-CO—(CH₂)₁₆—CO₂H)AQ- | | |
| | Me4Pal-AFIEWLIEGGPSSGAPPPSGS-NH₂ | | |
| 831 | Y-Aib-QGTFTSD-4Pal-SQ-αMeL-LDKK((2-[2-(2-Amino- | 837 | 4961.5 |
| | ethoxy)-ethoxy]-acetyl)-(γ-Glu)-CO—(CH₂)₁₆—CO₂H)AQ- | | |
| | Me4Pal-AFIEWLIEGGPSSGAPPPSGT-NH₂ | | |
| 832 | Y-Aib-QGTFTSD-4Pal-SQ-αMeL-LDKK((2-[2-(2-Amino- | 838 | 5008.6 |
| | ethoxy)-ethoxy]-acetyl)-(γ-Glu)-CO—(CH₂)₁₆—CO₂H)AQ- | | |
| | Me4Pal-AFIEWLIEGGPSSGAPPPSG-4Pal-NH₂ | | |
| 833 | Y-Aib-QGTFTSD-4Pal-SQ-αMeL-LD-Orn-K((2-[2-(2- | 839 | 4938.5 |
| | Amino-ethoxy)-ethoxy]-acetyl)-(γ-Glu)₂-CO—(CH₂)₁₆- | | |
| | CO₂H)AQ-Me4Pal-AFIEYLIE-Aib-GPSSGAPPPSGS-NH₂ | | |
| 834 | Y-Aib-QGTFTSD-4Pal-SQ-αMeL-LDKK((2-[2-(2-Amino- | 840 | 4966.6 |
| | ethoxy)-ethoxy]-acetyl)-(γ-Glu)-CO—(CH₂)₁₆—CO₂H)AQ- | | |
| | Me4Pal-AFIEYLIE-Aib-GPSSGAPPPSGT-NH₂ | | |
| 835 | Y-Aib-QGTFTSD-4Pal-SQ-αMeL-LDKK((2-[2-(2-Amino- | 841 | 5013.6 |
| | ethoxy)-ethoxy]-acetyl)-(γ-Glu)-CO—(CH₂)₁₆—CO₂H)AQ- | | |
| | Me4Pal-AFIEYLIE-Aib-GPSSGAPPPSG-4Pal-NH₂ | | |
| 836 | Y-Aib-QGTFTSD-4Pal-S-Orn-αMeL-LDKK((2-[2-(2- | 842 | 4847.4 |
| | Amino-ethoxy)-ethoxy]-acetyl)-(γ-Glu)-CO—(CH₂)₁₆- | | |
| | CO₂H)AQ-Aib-AFIE-αMeY-LIEGGPSSGAPPPSGS-NH₂ | | |
| 837 | Y-Aib-QGTFTSD-4Pal-SR-αMeL-LDKK((2-[2-(2-Amino- | 843 | 4889.5 |
| | ethoxy)-ethoxy]-acetyl)-(γ-Glu)-CO—(CH₂)₁₆—CO₂H)AQ- | | |
| | Aib-AFIE-αMeY-LIEGGPSSGAPPPSGS-NH₂ | | |
| 838 | Y-Aib-QGTFTSD-4Pal-SQ-αMeL-LDKK((2-[2-(2-Amino- | 844 | 4861.4 |
| | ethoxy)-ethoxy]-acetyl)-(γ-Glu)-CO—(CH₂)₁₆—CO₂H)AQ- | | |
| | Aib-AFIE-αMeY-LIEGGPSSGAPPPSGS-NH₂ | | |
| 839 | Y-Aib-QGTFTSDFS-Orn-αMeL-LDKK((2-[2-(2-Amino- | 845 | 4846.4 |
| | ethoxy)-ethoxy]-acetyl)-(γ-Glu)-CO—(CH₂)₁₆—CO₂H)AQ- | | |
| | Aib-AFIE-αMeY-LIEGGPSSGAPPPSGS-NH₂ | | |
| 840 | Y-Aib-QGTFTSDFSR-αMeL-LDKK((2-[2-(2-Amino- | 846 | 4888.5 |
| | ethoxy)-ethoxy]-acetyl)-(γ-Glu)-CO—(CH₂)₁₆—CO₂H)AQ- | | |
| | Aib-AFIE-αMeY-LIEGGPSSGAPPPSGS-NH₂ | | |
| 841 | Y-Aib-QGTFTSDFSQ-αMeL-LDKK((2-[2-(2-Amino- | 847 | 4860.4 |
| | ethoxy)-ethoxy]-acetyl)-(γ-Glu)-CO—(CH₂)₁₆—CO₂H)AQ- | | |
| | Aib-AFIE-αMeY-LIEGGPSSGAPPPSGS-NH₂ | | |
| 842 | Y-Aib-QGTFTSD-4Pal-S-Orn-αMeL-LDKK((2-[2-(2- | 848 | 4924.5 |
| | Amino-ethoxy)-ethoxy]-acetyl)-(γ-Glu)-CO—(CH₂)₁₆- | | |
| | CO₂H)AQ-Me4Pal-AFIE-αMeY-LIEGGPSSGAPPPSGS- | | |
| | NH₂ | | |
| 843 | Y-Aib-QGTFTSD-4Pal-SR-αMeL-LDKK((2-[2-(2-Amino- | 849 | 4966.6 |
| | ethoxy)-ethoxy]-acetyl)-(γ-Glu)-CO—(CH₂)₁₆—CO₂H)AQ- | | |
| | Me4Pal-AFIE-αMeY-LIEGGPSSGAPPPSGS-NH₂ | | |
| 844 | Y-Aib-QGTFTSD-4Pal-SQ-αMeL-LDKK((2-[2-(2-Amino- | 850 | 4938.5 |
| | ethoxy)-ethoxy]-acetyl)-(γ-Glu)-CO—(CH₂)₁₆—CO₂H)AQ- | | |
| | Me4Pal-AFIE-αMeY-LIEGGPSSGAPPPSGS-NH₂ | | |
| 845 | Y-Aib-QGTFTSDFS-Orn-αMeL-LDKK((2-[2-(2-Amino- | 851 | 4923.5 |
| | ethoxy)-ethoxy]-acetyl)-(γ-Glu)-CO—(CH₂)₁₆—CO₂H)AQ- | | |
| | Me4Pal-AFIE-αMeY-LIEGGPSSGAPPPSGS-NH₂ | | |
| 846 | Y-Aib-QGTFTSDFSR-αMeL-LDKK((2-[2-(2-Amino- | 852 | 4965.6 |
| | ethoxy)-ethoxy]-acetyl)-(γ-Glu)-CO—(CH₂)₁₆—CO₂H)AQ- | | |
| | Me4Pal-AFIE-αMeY-LIEGGPSSGAPPPSGS-NH₂ | | |
| 847 | Y-Aib-QGTFTSDFSQ-αMeL-LDKK((2-[2-(2-Amino- | 853 | 4937.5 |
| | ethoxy)-ethoxy]-acetyl)-(γ-Glu)-CO—(CH₂)₁₆—CO₂H)AQ- | | |
| | Me4Pal-AFIE-αMeY-LIEGGPSSGAPPPSGS-NH₂ | | |
| 848 | Y-Aib-QGTFTSD-4Pal-SQ-αMeL-LDKK((2-[2-(2-Amino- | 854 | 4982.6 |
| | ethoxy)-ethoxy]-acetyl)-(γ-Glu)-CO—(CH₂)₁₆—CO₂H)AQ- | | |
| | Me4Pal-AFIEYLIE-Aib-GPSSGAPPPSSS-NH₂ | | |
| 849 | Y-Aib-QGTFTSD-4Pal-SQ-αMeL-LD-Orn-K((2-[2-(2- | 855 | 4924.5 |
| | Amino-ethoxy)-ethoxy]-acetyl)-(γ-Glu)-CO—(CH₂)₁₆- | | |
| | CO₂H)AQ-Me4Pal-AFIE-αMeY-LIEGGPSSGAPPPSGS- | | |
| | NH₂ | | |
| 850 | Y-Aib-QGTFTSD-4Pal-SQ-αMeL-LD-Orn-K((2-[2-(2- | 856 | 4847.4 |
| | Amino-ethoxy)-ethoxy]-acetyl)-(γ-Glu)-CO—(CH₂)₁₆- | | |
| | CO₂H)AQ-Aib-AFIE-αMeY-LIEGGPSSGAPPPSGS-NH₂ | | |
| 851 | Y-Aib-QGTFTSD-4Pal-SQ-αMeL-LDKK((2-[2-(2-Amino- | 857 | 4994.6 |
| | ethoxy)-ethoxy]-acetyl)-(γ-Glu)-CO—(CH₂)₁₆—CO₂H)AQ- | | |
| | Me4Pal-AFIEYLIE-Aib-GPSSGAPPPEGS-NH₂ | | |
| 852 | Y-Aib-QGTFTSD-4Pal-SQ-αMeL-LDKK((2-[2-(2-Amino- | 858 | 4980.5 |
| | ethoxy)-ethoxy]-acetyl)-(γ-Glu)-CO—(CH₂)₁₆—CO₂H)AQ- | | |
| | Me4Pal-AFIE-αMeY-LIEGGPSSGAPPPEGS-NH₂ | | |
| 853 | Y-Aib-QGTFTSD-4Pal-SQ-αMeL-LDKK((2-[2-(2-Amino- | 859 | 4903.5 |
| | ethoxy)-ethoxy]-acetyl)-(γ-Glu)-CO—(CH₂)₁₆—CO₂H)AQ- | | |
| | Aib-AFIE-αMeY-LIEGGPSSGAPPPEGS-NH₂ | | |
| 854 | Y-Aib-QGTFTSD-4Pal-SQ-αMeL-LDKK((2-[2-(2-Amino- | 860 | 5009.6 |
| | ethoxy)-ethoxy]-acetyl)-(γ-Glu)-CO—(CH₂)₁₆—CO₂H)AQ- | | |
| | Me4Pal-QFIEYLIE-Aib-GPSSGAPPPSGS-NH₂ | | |
| 855 | Y-Aib-QGTFTSD-4Pal-SQ-αMeL-LDKK((2-[2-(2-Amino- | 861 | 4995.6 |
| | ethoxy)-ethoxy]-acetyl)-(γ-Glu)-CO—(CH₂)₁₆—CO₂H)AQ- | | |
| | Me4Pal-QFIE-αMeY-LIEGGPSSGAPPPSGS-NH₂ | | |
| 856 | Y-Aib-QGTFTSD-4Pal-SQ-αMeL-LD-Orn-K((2-[2-(2- | 862 | 4995.6 |
| | Amino-ethoxy)-ethoxy]-acetyl)-(γ-Glu)-CO—(CH₂)₁₆- | | |
| | CO₂H)AQ-Me4Pal-QFIEYLIE-Aib-GPSSGAPPPSGS-NH₂ | | |
| 857 | Y-Aib-QGTFTSD-4Pal-SQ-αMeL-LD-Orn-K((2-[2-(2- | 863 | 4981.5 |
| | Amino-ethoxy)-ethoxy]-acetyl)-(γ-Glu)-CO—(CH₂)₁₆- | | |
| | CO₂H)AQ-Me4Pal-QFIE-αMeY-LIEGGPSSGAPPPSGS- | | |
| | NH₂ | | |
| 858 | Y-Aib-QGTFTSD-4Pal-SQ-αMeL-LDKK((γ-Glu)₂-CO— | 864 | 4936.5 |
| | (CH₂)₁₆—CO₂H)AQ-Me4Pal-AFIEYLIE-Aib- | | |
| | GPSSGAPPPSGS-NH₂ | | |
| 859 | Y-Aib-QGTFTSD-4Pal-SQ-αMeL-LDKK((γ-Glu)₃-CO— | 865 | 5065.6 |
| | (CH₂)₁₆—CO₂H)AQ-Me4Pal-AFIEYLIE-Aib- | | |
| | GPSSGAPPPSGS-NH₂ | | |
| 860 | Y-Aib-QGTFTSD-4Pal-SQ-αMeL-LDKK((2-[2-(2-Amino- | 866 | 5081.6 |
| | ethoxy)-ethoxy]-acetyl)-(γ-Glu)₂-CO—(CH₂)₁₆—CO₂H)AQ- | | |
| | Me4Pal-AFIEYLIE-Aib-GPSSGAPPPSGS-NH₂ | | |
| 861 | Y-Aib-QGTFTSD-4Pal-SQ-αMeL-LDKK((γ-Glu)-(2-[2-(2- | 867 | 5081.6 |
| | Amino-ethoxy)-ethoxy]-acetyl)-(γ-Glu)-CO—(CH₂)₁₆- | | |
| | CO₂H)AQ-Me4Pal-AFIEYLIE-Aib-GPSSGAPPPSGS-NH₂ | | |
| 862 | Y-Aib-QGTFTSDFSQ-αMeL-LDKK((γ-Glu)₃-CO—(CH₂)₁₆- | 868 | 5064.6 |
| | CO₂H)AQ-Me4Pal-AFIEYLIE-Aib-GPSSGAPPPSGS-NH₂ | | |
| 863 | Y-Aib-QGTFTSDFSQ-αMeL-LDKK((2-[2-(2-Amino- | 869 | 5080.7 |
| | ethoxy)-ethoxy]-acetyl)-(γ-Glu)₂-CO—(CH₂)₁₆—CO₂H)AQ- | | |
| | Me4Pal-AFIEYLIE-Aib-GPSSGAPPPSGS-NH₂ | | |
| 864 | Y-Aib-QGTFTSDFSQ-αMeL-LDKK((γ-Glu)-(2-[2-(2- | 870 | 5080.7 |
| | Amino-ethoxy)-ethoxy]-acetyl)-(γ-Glu)-CO—(CH₂)₁₆- | | |
| | CO₂H)AQ-Me4Pal-AFIEYLIE-Aib-GPSSGAPPPSGS-NH₂ | | |
| 865 | Y-Aib-QGTFTSD-4Pal-S-Orn-αMeL-LDKK((γ-Glu)₂-CO— | 871 | 4922.5 |
| | (CH₂)₁₆—CO₂H)AQ-Me4Pal-AFIEYLIE-Aib- | | |
| | GPSSGAPPPSGS-NH₂ | | |
| 866 | Y-Aib-QGTFTSD-4Pal-S-Orn-αMeL-LDKK((γ-Glu)₃-CO— | 872 | 5051.6 |
| | (CH₂)₁₆—CO₂H)AQ-Me4Pal-AFIEYLIE-Aib- | | |
| | GPSSGAPPPSGS-NH₂ | | |
| 867 | Y-Aib-QGTFTSD-4Pal-S-Orn -- αMeL-LDKK((2-[2-(2- | 873 | 5067.7 |
| | Amino-ethoxy)-ethoxy]-acetyl)-(γ-Glu)₂-CO—(CH₂)₁₆- | | |
| | CO₂H)AQ-Me4Pal-AFIEYLIE-Aib-GPSSGAPPPSGS-NH₂ | | |
| 868 | Y-Aib-QGTFTSD-4Pal-S-Orn -- αMeL-LDKK((γ-Glu)-(2-[2- | 874 | 5067.7 |
| | (2-Amino-ethoxy)-ethoxy]-acetyl)-(γ-Glu)-CO—(CH₂)₁₆- | | |
| | CO₂H)AQ-Me4Pal-AFIEYLIE-Aib-GPSSGAPPPSGS-NH₂ | | |
| 869 | Y-Aib-QGTFTSD-4Pal-SQ-αMeL-LDKK((2-[2-(2-Amino- | 875 | 4995.6 |
| | ethoxy)-ethoxy]-acetyl)-(γ-Glu)₂-CO—(CH₂)₁₆—CO₂H)AQ- | | |
| | Me4Pal-AFIEYLIAGGPSSGAPPPSGS-NH₂ | | |
| 870 | Y-Aib-QGTFTSD-4Pal-SQ-αMeL-LDKK((γ-Glu)₂-CO— | 876 | 4850.4 |
| | (CH₂)₁₆—CO₂H)AQ-Me4Pal-AFIEYLIAGGPSSGAPPPSGS- | | |
| | NH₂ | | |
| 871 | Y-Aib-QGTFTSD-4Pal-SQ-αMeL-LDKK((2-[2-(2-Amino- | 877 | 5076.6 |
| | ethoxy)-ethoxy]-acetyl)-(γ-Glu)₂-CO—(CH₂)₁₆—CO₂H)AQ- | | |
| | Me4Pal-AFIEWLIEGGPSSGAPPPSGS-NH₂ | | |
| 872 | Y-Aib-QGTFTSD-4Pal-SQ-αMeL-LDKK((γ-Glu)₂-CO— | 878 | 4931.5 |
| | (CH₂)₁₆—CO₂H)AQ-Me4Pal-AFIEWLIEGGPSSGAPPPSGS- | | |
| | NH₂ | | |
| 873 | Y-Aib-QGTFTSDFSQ-αMeL-LDKK((2-[2-(2-Amino- | 879 | 4923.5 |
| | ethoxy)-ethoxy]-acetyl)-(γ-Glu)-CO—(CH₂)₁₆—CO₂H)AQ- | | |
| | Me4Pal-AFIEYLIEGGPSSGAPPPSGS-NH₂ | | |
| 874 | Y-Aib-QGTFTSDFSQ-αMeL-LDKK((γ-Glu)₂-CO—(CH₂)₁₆- | 880 | 4907.4 |
| | CO₂H)AQ-Me4Pal-AFIEYLIEGGPSSGAPPPSGS-NH₂ | | |
| 875 | Y-Aib-QGTFTSDFSQ-αMeL-LDKK((2-[2-(2-Amino- | 881 | 4865.4 |
| | ethoxy)-ethoxy]-acetyl)-(γ-Glu)-CO—(CH₂)₁₆—CO₂H)AQ- | | |
| | Me4Pal-AFIEYLIAGGPSSGAPPPSGS-NH₂ | | |
| 876 | Y-Aib-QGTFTSDFSQ-αMeL-LDKK((γ-Glu)₂-CO—(CH₂)₁₆- | 882 | 4849.4 |
| | CO₂H)AQ-Me4Pal-AFIEYLIAGGPSSGAPPPSGS-NH₂ | | |
| 877 | Y-Aib-QGTFTSDFSQ-αMeL-LDKK((2-[2-(2-Amino- | 883 | 4946.5 |
| | ethoxy)-ethoxy]-acetyl)-(γ-Glu)-CO—(CH₂)₁₆—CO₂H)AQ- | | |
| | Me4Pal-AFIEWLIEGGPSSGAPPPSGS-NH₂ | | |
| 878 | Y-Aib-QGTFTSDFSQ-αMeL-LDKK((2-[2-(2-Amino- | 884 | 4930.5 |
| | ethoxy)-ethoxy]-acetyl)-(γ-Glu)-CO—(CH₂)₁₆—CO₂H)AQ- | | |
| | Me4Pal-AFIEWLIEGGPSSGAPPPSGS-NH₂ | | |
| 879 | Y-Aib-QGTFTSDFS-Orn-αMeL-LDKK((2-[2-(2-Amino- | 885 | 4995.6 |
| | ethoxy)-ethoxy]-acetyl)-(γ-Glu)-CO—(CH₂)₁₆—CO₂H)AQ- | | |
| | Me4Pal-EFIEYLIE-Aib-GPSSGAPPPSGS-NH₂ | | |
| 880 | Y-Aib-QGTFTSDFS-Orn-αMeL-LDKK((2-[2-(2-Amino- | 886 | 4981.6 |
| | ethoxy)-ethoxy]-acetyl)-(γ-Glu)-CO—(CH₂)₁₆—CO₂H)AQ- | | |
| | Me4Pal-DFIEYLIE-Aib-GPSSGAPPPSGS-NH₂ | | |
| 881 | Y-Aib-QGTFTSD-4Pal-SQ-αMeL-LDKK((2-[2-(2-Amino- | 887 | 4994.6 |
| | ethoxy)-ethoxy]-acetyl)-(γ-Glu)-CO—(CH₂)₁₆—CO₂H)AQ- | | |
| | Me4Pal-AFIEYLIE-Aib-GPSSGAPPPSGE-NH₂ | | |
| 882 | Y-Aib-QGTFTSD-4Pal-SQ-αMeL-LDKK((γ-Glu)₂-CO— | 888 | 4978.5 |
| | (CH₂)₁₆—CO₂H)AQ-Me4Pal-AFIEYLIE-Aib- | | |
| | GPSSGAPPPSGE-NH₂ | | |
| 883 | Y-Aib-QGTFTSD-4Pal-SQ-αMeL-LDKK((γ-Glu)₂-CO— | 889 | 4892.4 |
| | (CH₂)₁₆—CO₂H)AQ-Me4Pal-AFIEYLIAGGPSSGAPPPSGE- | | |
| | NH₂ | | |
| 884 | Y-Aib-QGTFTSD-4Pal-SQ-αMeL-LDKK((γ-Glu)₂-CO— | 890 | 5020.6 |
| | (CH₂)₁₆—CO₂H)AQ-Me4Pal-AFIEYLIE-Aib- | | |
| | GPSSGAPPPEGE-NH₂ | | |
| 885 | Y-Aib-QGTFTSD-4Pal-SQ-αMeL-LDKK((2-[2-(2-Amino- | 891 | 4953.5 |
| | ethoxy)-ethoxy]-acetyl)-(γ-Glu)-CO—(CH₂)₁₆—CO₂H)AQ- | | |
| | Me4Pal-AFIEYLIE-Aib-GPSSGAPPPSGS | | |
| 886 | Y-Aib-QGTFTSD-4Pal-SQ-αMeL-LDKK((2-[2-(2-Amino- | 892 | 5081.6 |
| | ethoxy)-ethoxy]-acetyl)-(γ-Glu)-CO—(CH₂)₁₆—CO₂H)AQ- | | |
| | Me4Pal-AFIEYLIE-Aib-GPSSGAPPPSGSE-NH₂ | | |
| 887 | Y-Aib-QGTFTSD-4Pal-SQ-αMeL-LDKK((2-[2-(2-Amino- | 893 | 5082.6 |
| | ethoxy)-ethoxy]-acetyl)-(γ-Glu)-CO—(CH₂)₁₆—CO₂H)AQ- | | |
| | Me4Pal-AFIEYLIE-Aib-GPSSGAPPPSGSE | | |
| 888 | Y-Aib-QGTFTSD-4Pal-SQ-αMeL-LDKK((2-[2-(2-Amino- | 894 | 5138.7 |
| | ethoxy)-ethoxy]-acetyl)-(γ-Glu)-CO—(CH₂)₁₆—CO₂H)AQ- | | |
| | Me4Pal-AFIEYLIE-Aib-GPSSGAPPPSGSGE-NH₂ | | |
| 889 | Y-Aib-QGTFTSD-4Pal-SQ-αMeL-LDKK((2-[2-(2-Amino- | 895 | 5139.7 |
| | ethoxy)-ethoxy]-acetyl)-(γ-Glu)-CO—(CH₂)₁₆—CO₂H)AQ- | | |
| | Me4Pal-AFIEYLIE-Aib-GPSSGAPPPSGSGE | | |
| 890 | Y-Aib-QGTFTSD-4Pal-SQ-αMeL-LDKK((γ-Glu)₂-CO— | 896 | 5065.6 |
| | (CH₂)₁₆—CO₂H)AQ-Me4Pal-AFIEYLIE-Aib- | | |
| | GPSSGAPPPSGSE-NH₂ | | |
| 891 | Y-Aib-QGTFTSD-4Pal-SQ-αMeL-LDKK((γ-Glu)₂-CO— | 897 | 5122.6 |
| | (CH₂)₁₆—CO₂H)AQ-Me4Pal-AFIEYLIE-Aib- | | |
| | GPSSGAPPPSGSGE | | |
| 892 | Y-Aib-QGTFTSD-4Pal-SQ-αMeL-LDKK((γ-Glu)₂-CO— | 898 | 5066.6 |
| | (CH₂)₁₆—CO₂H)AQ-Me4Pal-AFIEYLIE-Aib- | | |
| | GPSSGAPPPSGSE | | |
| 893 | Y-Aib-QGTFTSD-4Pal-SQ-αMeL-LDKK((γ-Glu)₂-CO— | 899 | 5123.6 |
| | (CH₂)₁₆—CO₂H)AQ-Me4Pal-AFIEYLIE-Aib- | | |
| | GPSSGAPPPSGSGE | | |
| 894 | Y-Aib-QGTFTSD-4Pal-SQ-αMeL-LDKK((Glu)-(γ-Glu)- | 900 | 4936.5 |
| | CO—(CH₂)₁₆—CO₂H)AQ-Me4Pal-AFIEYLIE-Aib- | | |
| | GPSSGAPPPSGS-NH₂ | | |
| 895 | Y-Aib-QGTFTSD-4Pal-SQ-αMeL-LDKK((Glu)₂-(γ-Glu)- | 901 | 5065.6 |
| | CO—(CH₂)₁₆—CO₂H)AQ-Me4Pal-AFIEYLIE-Aib- | | |
| | GPSSGAPPPSGS-NH₂ | | |
| 896 | Y-Aib-QGTFTSD-4Pal-SQ-αMeL-LDKK((Glu)-(γ-Glu)- | 902 | 5065.6 |
| | (Glu)-CO—(CH₂)₁₆—CO₂H)AQ-Me4Pal-AFIEYLIE-Aib- | | |
| | GPSSGAPPPSGS-NH₂ | | |
| 897 | Y-Aib-QGTFTSD-4Pal-SQ-αMeL-LDKK((2-[2-(2-Amino- | 903 | 5210.8 |
| | ethoxy)-ethoxy]-acetyl)-(γ-Glu)-CO—(CH₂)₁₆—CO₂H)AQ- | | |
| | Me4Pal-AFIEYLIE-Aib-GPSSGAPPPSGSEE-NH₂ | | |
| 898 | Y-Aib-QGTFTSD-4Pal-SQ-αMeL-LDKK((2-[2-(2-Amino- | 904 | 5339.9 |
| | ethoxy)-ethoxy]-acetyl)-(γ-Glu)-CO—(CH₂)₁₆—CO₂H)AQ- | | |
| | Me4Pal-AFIEYLIE-Aib-GPSSGAPPPSGSEEE-NH₂ | | |
| 899 | Y-Aib-QGTFTSD-4Pal-SQ-αMeL-LDKK((γ-Glu)₂-CO— | 905 | 5194.7 |
| | (CH₂)₁₆—CO₂H)AQ-Me4Pal-AFIEYLIE-Aib- | | |
| | GPSSGAPPPSGSEE-NH₂ | | |
| 900 | Y-Aib-QGTFTSD-4Pal-SQ-αMeL-LDKK((γ-Glu)₂-CO— | 906 | 5323.8 |
| | (CH₂)₁₆—CO₂H)AQ-Me4Pal-AFIEYLIE-Aib- | | |
| | GPSSGAPPPSGSEEE-NH₂ | | |
| 901 | Y-Aib-QGTFTSD-4Pal-SK-αMeL-LDKK((2-[2-(2-Amino- | 907 | 5005.6 |
| | ethoxy)-ethoxy]-acetyl)-(γ-Glu)-CO—(CH₂)₁₆—CO₂H)AQ- | | |
| | Aib-AFIEYLIE-Aib-GPSSGAPPPSGSE-NH₂ | | |
| 902 | Y-Aib-QGTFTSD-4Pal-SK-αMeL-LDKK((2-[2-(2-Amino- | 908 | 5134.7 |
| | ethoxy)-ethoxy]-acetyl)-(γ-Glu)-CO—(CH₂)₁₆—CO₂H)AQ- | | |
| | Aib-AFIEYLIE-Aib-GPSSGAPPPSGSEE-NH₂ | | |
| 903 | Y-Aib-QGTFTSD-4Pal-SK-αMeL-LDKK((2-[2-(2-Amino- | 909 | 5263.8 |
| | ethoxy)-ethoxy]-acetyl)-(γ-Glu)-CO—(CH₂)₁₆—CO₂H)AQ- | | |
| | Aib-AFIEYLIE-Aib-GPSSGAPPPSGSEEE-NH₂ | | |
| 904 | Y-Aib-QGTFTSD-4Pal-SK-αMeL-LDKK((γ-Glu)₂-CO— | 910 | 4988.6 |
| | (CH₂)₁₆—CO₂H)AQ-Aib-AFIEYLIE-Aib- | | |
| | GPSSGAPPPSGSE-NH₂ | | |
| 905 | Y-Aib-QGTFTSD-4Pal-SK-αMeL-LDKK((γ-Glu)₂-CO— | 911 | 5117.7 |
| | (CH₂)₁₆—CO₂H)AQ-Aib-AFIEYLIE-Aib- | | |
| | GPSSGAPPPSGSEE-NH₂ | | |
| 906 | Y-Aib-QGTFTSD-4Pal-SK-αMeL-LDKK((γ-Glu)₂-CO— | 912 | 5246.8 |
| | (CH₂)₁₆—CO₂H)AQ-Aib-AFIEYLIE-Aib- | | |
| | GPSSGAPPPSGSEEE-NH₂ | | |
| 907 | Y-Aib-QGTFTSD-4Pal-SK-αMeL-LDKK((γ-Glu)₂-CO— | 913 | 4859.4 |
| | (CH₂)₁₆—CO₂H)AQ-Aib-AFIEYLIE-Aib-GPSSGAPPPSGS- | | |
| | NH₂ | | |
| 908 | Y-Aib-QGTFTSD-4Pal-SK-αMeL-LDKK((2-[2-(2-Amino- | 914 | 4847.4 |
| | ethoxy)-ethoxy]-acetyl)-(γ-Glu)-CO—(CH₂)₁₆—CO₂H)AQ- | | |
| | Aib-AFIEYLIEGGPSSGAPPPSGS-NH₂ | | |
| 909 | Y-Aib-QGTFTSD-4Pal-SR-αMeL-LDKK((2-[2-(2-Amino- | 915 | 4889.5 |
| | ethoxy)-ethoxy]-acetyl)-(γ-Glu)-CO—(CH₂)₁₆—CO₂H)AQ- | | |
| | Aib-AFIE-αMeY-LLEGGPSSGAPPPSGS-NH₂ | | |
| 910 | Y-Aib-QGTFTSD-4Pal-SQ-αMeL-LDKK((2-[2-(2-Amino- | 916 | 4861.4 |
| | ethoxy)-ethoxy]-acetyl)-(γ-Glu)-CO—(CH₂)₁₆—CO₂H)AQ- | | |
| | Aib-AFIE-αMeY-LLEGGPSSGAPPPSGS-NH₂ | | |
| 911 | Y-Aib-QGTFTSD-4Pal-SQ-αMeL-LD-Orn-K((2-[2-(2- | 917 | 4847.4 |
| | Amino-ethoxy)-ethoxy]-acetyl)-(γ-Glu)-CO—(CH₂)₁₆- | | |
| | CO₂H)AQ-Aib-AFIE-αMeY-LLEGGPSSGAPPPSGS-NH₂ | | |
| 912 | Y-Aib-QGTFTSDFSK-αMeL-LDKK((2-[2-(2-Amino- | 918 | 4873.5 |
| | ethoxy)-ethoxy]-acetyl)-(γ-Glu)-CO—(CH₂)₁₆—CO₂H)AQ- | | |
| | Aib-AFIE-Me4Pal-LIE-Aib-GPSSGAPPPSGS-NH₂ | | |
| 913 | Y-Aib-QGTFTSDFSQ-αMeL-LDKK((2-[2-(2-Amino- | 919 | 4873.5 |
| | ethoxy)-ethoxy]-acetyl)-(γ-Glu)-CO—(CH₂)₁₆—CO₂H)AQ- | | |
| | Aib-AFIE-Me4Pal-LIE-Aib-GPSSGAPPPSGS-NH₂ | | |
| 914 | Y-Aib-QGTFTSD-4Pal-SK-αMeL-LDKK((2-[2-(2-Amino- | 920 | 4874.5 |
| | ethoxy)-ethoxy]-acetyl)-(γ-Glu)-CO—(CH₂)₁₆—CO₂H)AQ- | | |
| | Aib-AFIE-Me4Pal-LIE-Aib-GPSSGAPPPSGS-NH₂ | | |
| 915 | Y-Aib-QGTFTSD-4Pal-SK-αMeL-LDKK((2-[2-(2-Amino- | 921 | 4952.6 |
| | ethoxy)-ethoxy]-acetyl)-(γ-Glu)-CO—(CH₂)₁₆—CO₂H)AQ- | | |
| | Me4Pal-AFIEYLIE-Aib-GPSSGAPPPSGS-NH₂ | | |
| 916 | Y-Aib-QGTFTSD-4Pal-SK-αMeL-LDKK((2-[2-(2-Amino- | 922 | 4951.6 |
| | ethoxy)-ethoxy]-acetyl)-(γ-Glu)-CO—(CH₂)₁₆—CO₂H)AQ- | | |
| | Me4Pal-AFIE-Me4Pal-LIE-Aib-GPSSGAPPPSGS-NH₂ | | |
| 917 | Y-Aib-QGTFTSD-4Pal-SQ-αMeL-LDKK((2-[2-(2-Amino- | 923 | 4951.5 |
| | ethoxy)-ethoxy]-acetyl)-(γ-Glu)-CO—(CH₂)₁₆—CO₂H)AQ- | | |
| | Me4Pal-AFIE-Me4Pal-LIE-Aib-GPSSGAPPPSGS-NH₂ | | |
| 918 | Y-Aib-QGTFTSD-4Pal-SQ-αMeL-LDKK((2-[2-(2-Amino- | 924 | 4995.5 |
| | ethoxy)-ethoxy]-acetyl)-(γ-Glu)-CO—(CH₂)₁₆—CO₂H)AQ- | | |
| | Me4Pal-AFIEYLIE-Aib-GPSSGAPPPSeG | | |
| 919 | Y-Aib-QGTFTSD-4Pal-SQ-αMeL-LDKK((2-[2-(2-Amino- | 925 | 5067.6 |
| | ethoxy)-ethoxy]-acetyl)-(γ-Glu)-CO—(CH₂)₁₆—CO₂H)AQ- | | |
| | Me4Pal-AFIEYLIE-Aib-GPSSGAPPPSeE | | |
| 920 | Y-Aib-QGTFTSD-4Pal-SQ-αMeL-LDKK(e-(γ-Glu)-CO— | 926 | 4936.5 |
| | (CH₂)₁₆—CO₂H)AQ-Me4Pal-AFIEYLIE-Aib- | | |
| | GPSSGAPPPSGS-NH₂ | | |
| 921 | Y-Aib-QGTFTSD-4Pal-SQ-αMeL-LDKK((e)₂-(γ-Glu)-CO— | 927 | 5065.6 |
| | (CH₂)₁₆—CO₂H)AQ-Me4Pal-AFIEYLIE-Aib- | | |
| | GPSSGAPPPSGS-NH₂ | | |
| 922 | Y-Aib-QGTFTSD-4Pal-SQ-αMeL-LDKK((γ-Glu)-(e)₂-CO— | 928 | 5065.6 |
| | (CH₂)₁₆—CO₂H)AQ-Me4Pal-AFIEYLIE-Aib- | | |
| | GPSSGAPPPSGS-NH₂ | | |
| 923 | Y-Aib-QGTFTSD-4Pal-SQ-αMeL-LDKK(e-(γ-Glu)-e-CO— | 929 | 5065.6 |
| | (CH₂)₁₆—CO₂H)AQ-Me4Pal-AFIEYLIE-Aib- | | |
| | GPSSGAPPPSGS-NH₂ | | |
| 924 | Y-Aib-QGTFTSD-4Pal-SQ-αMeL-LDKK(e-(γ-Glu)-CO— | 930 | 5066.6 |
| | (CH₂)₁₆—CO₂H)AQ-Me4Pal-AFIEYLIE-Aib- | | |
| | GPSSGAPPPSGSE-NH₂ | | |
| 925 | Y-Aib-QGTFTSD-4Pal-SQ-αMeL-LDKK((e)₂-(γ-Glu)-CO— | 931 | 5195.7 |
| | (CH₂)₁₆—CO₂H)AQ-Me4Pal-AFIEYLIE-Aib- | | |
| | GPSSGAPPPSGSE-NH₂ | | |
| 926 | Y-Aib-QGTFTSD-4Pal-SQ-αMeL-LDKK((γ-Glu)-(e)₂-CO— | 932 | 5195.7 |
| | (CH₂)₁₆—CO₂H)AQ-Me4Pal-AFIEYLIE-Aib- | | |
| | GPSSGAPPPSGSE-NH₂ | | |
| 927 | Y-Aib-QGTFTSD-4Pal-SQ-αMeL-LDKK(e-(γ-Glu)-e-CO— | 933 | 5195.7 |
| | (CH₂)₁₆—CO₂H)AQ-Me4Pal-AFIEYLIE-Aib- | | |
| | GPSSGAPPPSGSE-NH₂ | | |
| 928 | Y-Aib-QGTFTSD-4Pal-SQ-αMeL-LDKK(e-(γ-Glu)-CO— | 934 | 5195.7 |
| | (CH₂)₁₆—CO₂H)AQ-Me4Pal-AFIEYLIE-Aib- | | |
| | GPSSGAPPPSGSEE-NH₂ | | |
| 929 | Y-Aib-QGTFTSD-4Pal-SQ-αMeL-LDKK((e)₂-(γ-Glu)-CO— | 935 | 5324.8 |
| | (CH₂)₁₆—CO₂H)AQ-Me4Pal-AFIEYLIE-Aib- | | |
| | GPSSGAPPPSGSEE-NH₂ | | |
| 930 | Y-Aib-QGTFTSD-4Pal-SQ-αMeL-LDKK((γ-Glu)-(e)₂-CO— | 936 | 5324.8 |
| | (CH₂)₁₆—CO₂H)AQ-Me4Pal-AFIEYLIE-Aib- | | |
| | GPSSGAPPPSGSEE-NH₂ | | |
| 931 | Y-Aib-QGTFTSD-4Pal-SQ-αMeL-LDKK(e-(γ-Glu)-e-CO— | 937 | 5324.8 |
| | (CH₂)₁₆—CO₂H)AQ-Me4Pal-AFIEYLIE-Aib- | | |
| | GPSSGAPPPSGSEE-NH₂ | | |
| 932 | Y-Aib-QGTFTSD-4Pal-SQ-αMeL-LD-Orn-K((2-[2-(2- | 938 | 4924.5 |
| | Amino-ethoxy)-ethoxy]-acetyl)-(γ-Glu)-CO—(CH₂)₁₆- | | |
| | CO₂H)AQ-Me4Pal-AFIE-αMeY-LLEGGPSSGAPPPSGS- | | |
| | NH₂ | | |
| 933 | Y-Aib-QGTFTSD-4Pal-S-Orn -- αMeL-LD-Orn-K((2-[2-(2- | 939 | 4833.4 |
| | Amino-ethoxy)-ethoxy]-acetyl)-(γ-Glu)-CO—(CH₂)₁₆- | | |
| | CO₂H)AQ-Aib-AFIE-αMeY-LLEGGPSSGAPPPSGS-NH₂ | | |
| 934 | Y-Aib-QGTFTSD-4Pal-SQ-αMeL-LDKK((γ-Glu)₂-CO— | 940 | 4979.5 |
| | (CH₂)₁₆—CO₂H)AQ-Me4Pal-QFIE-αMeY- | | |
| | LIEGGPSSGAPPPSGS-NH₂ | | |
| 935 | Y-Aib-QGTFTSD-4Pal-SQ-αMeL-LD-Orn-K((γ-Glu)₂-CO— | 941 | 4922.5 |
| | (CH₂)₁₆—CO₂H)AQ-Me4Pal-AFIEYLIE-Aib- | | |
| | GPSSGAPPPSGS-NH₂ | | |
| 936 | Y-Aib-QGTFTSD-4Pal-SQ-αMeL-LD-Orn-K((2-[2-(2- | 942 | 5051.6 |
| | Amino-ethoxy)-ethoxy]-acetyl)-(γ-Glu)₂-CO—(CH₂)₁₆- | | |
| | CO₂H)AQ-Me4Pal-AFIEYLIE-Aib-GPSSGAPPPSGSE- | | |
| | NH₂ | | |
| 937 | Y-Aib-QGTFTSD-4Pal-SQ-αMeL-LD-Orn-K((γ-Glu)₂-CO— | 943 | 5180.7 |
| | (CH₂)₁₆—CO₂H)AQ-Me4Pal-AFIEYLIE-Aib- | | |
| | GPSSGAPPPSGSEE-NH₂ | | |
| 938 | Y-Aib-QGTFTSD-4Pal-SQ-αMeL-LDK-K((γ-Glu)₂-CO— | 944 | 4845.4 |
| | (CH₂)₁₆—CO₂H)AQ-Aib-AFIE-αMeY- | | |
| | LLEGGPSSGAPPPSGS-NH₂ | | |
| 939 | Y-Aib-QGTFTSD-4Pal-S-Orn-αMeL-LD-Orn-K((γ-Glu)₂- | 945 | 4908.5 |
| | CO—(CH₂)₁₆—CO₂H)AQ-Me4Pal-AFIEYLIE-Aib- | | |
| | GPSSGAPPPSGS-NH₂ | | |
| 940 | Y-Aib-QGTFTSD-4Pal-S-Orn-αMeL-LD-Orn-K((γ-Glu)₂- | 946 | 4965.5 |
| | CO—(CH₂)₁₆—CO₂H)AQ-Me4Pal-QFIEYLIE-Aib- | | |
| | GPSSGAPPPSGS-NH₂ | | |
| 941 | Y-Aib-QGTFTSD-4Pal-S-Orn-αMeL-LDKK((γ-Glu)₂-CO— | 947 | 4831.4 |
| | (CH₂)₁₆—CO₂H)AQ-Aib-AFIE-αMeY- | | |
| | LIEGGPSSGAPPPSGS-NH₂ | | |
| 942 | Y-Aib-QGTFTSD-4Pal-S-Orn-αMeL-LDKK((γ-Glu)₂-CO— | 948 | 4831.4 |
| | (CH₂)₁₆—CO₂H)AQ-Aib-AFIE-αMeY- | | |
| | LLEGGPSSGAPPPSGS-NH₂ | | |
| 943 | Y-Aib-QGTFTSD-4Pal-S-Orn-αMeL-LD-Orn-K((γ-Glu)₃- | 949 | 5166.7 |
| | CO—(CH₂)₁₆—CO₂H)AQ-Me4Pal-AFIEYLIE-Aib- | | |
| | GPSSGAPPPSGSE-NH₂ | | |
| 944 | Y-Aib-QGTFTSD-4Pal-S-Orn-αMeL-LDKK((γ-Glu)₂-CO— | 950 | 5089.6 |
| | (CH₂)₁₆—CO₂H)AQ-Aib-AFIE-αMeY- | | |
| | LLEGGPSSGAPPPSGSEE-NH₂ | | |
| 945 | Y-Aib-QGTFTSD-4Pal-SQ-αMeL-LDKK((γ-Glu)₂-CO— | 951 | 5103.6 |
| | (CH₂)₁₆—CO₂H)AQ-Aib-AFIE-αMeY- | | |
| | LLEGGPSSGAPPPSGSEE-NH₂ | | |
| 946 | Y-Aib-QGTFTSD-4Pal-SQ-αMeL-LD-Orn-K((γ-Glu)₂-CO— | 952 | 5089.6 |
| | (CH₂)₁₆—CO₂H)AQ-Aib-AFIE-αMeY- | | |
| | LLEGGPSSGAPPPSGSEE-NH₂ | | |
| 947 | Y-Aib-QGTFTSD-4Pal-SQ-αMeL-LDKK((2-[2-(2-Amino- | 953 | 5053.6 |
| | ethoxy)-ethoxy]-acetyl)-(γ-Glu)₂-CO—(CH₂)₁₆—CO₂H)AQ- | | |
| | Me4Pal-AFIEYLIAGGPSSGEPPPSGS-NH₂ | | |
| 948 | Y-Aib-QGTFTSD-4Pal-SQ-αMeL-LDKK((2-[2-(2-Amino- | 954 | 4923.5 |
| | ethoxy)-ethoxy]-acetyl)-(γ-Glu)-CO—(CH₂)₁₆—CO₂H)AQ- | | |
| | Me4Pal-AFIE-Me4Pal-LIEGGPSSGAPPPSGS-NH₂ | | |
| 949 | Y-Aib-QGTFTSD-4Pal-S-Orn-αMeL-LDKK((2-[2-(2- | 955 | 4909.5 |
| | Amino-ethoxy)-ethoxy]-acetyl)-(γ-Glu)-CO—(CH₂)₁₆- | | |
| | CO₂H)AQ-Me4Pal-AFIE-Me4Pal-LIEGGPSSGAPPPSGS- | | |
| | NH₂ | | |
| 950 | Y-Aib-QGTFTSD-4Pal-SR-αMeL-LDKK((2-[2-(2-Amino- | 956 | 4951.5 |
| | ethoxy)-ethoxy]-acetyl)-(γ-Glu)-CO—(CH₂)₁₆—CO₂H)AQ- | | |
| | Me4Pal-AFIE-Me4Pal-LIEGGPSSGAPPPSGS-NH₂ | | |
| 951 | Y-Aib-QGTFTSD-4Pal-SQ-αMeL-LDKK((γ-Glu)₂-CO— | 957 | 4907.4 |
| | (CH₂)₁₆—CO₂H)AQ-Me4Pal-AFIE-Me4Pal- | | |
| | LIEGGPSSGAPPPSGS-NH₂ | | |
| 952 | Y-Aib-QGTFTSD-4Pal-S-Orn-αMeL-LDKK((γ-Glu)₂-CO— | 958 | 4893.5 |
| | (CH₂)₁₆—CO₂H)AQ-Me4Pal-AFIE-Me4Pal- | | |
| | LIEGGPSSGAPPPSGS-NH₂ | | |
| 953 | Y-Aib-QGTFTSD-4Pal-SR-αMeL-LDKK((γ-Glu)₂-CO— | 959 | 4935.5 |
| | (CH₂)₁₆—CO₂H)AQ-Me4Pal-AFIE-Me4Pal- | | |
| | LIEGGPSSGAPPPSGS-NH₂ | | |
| 954 | Y-Aib-QGTFTSD-4Pal-SQ-αMeL-LDKK((2-[2-(2-Amino- | 960 | 5181.7 |
| | ethoxy)-ethoxy]-acetyl)-(γ-Glu)-CO—(CH₂)₁₆—CO₂H)AQ- | | |
| | Me4Pal-AFIE-Me4Pal-LIEGGPSSGAPPPSGSEE-NH₂ | | |
| 955 | Y-Aib-QGTFTSD-4Pal-S-Orn-αMeL-LDKK((2-[2-(2- | 961 | 5167.7 |
| | Amino-ethoxy)-ethoxy]-acetyl)-(γ-Glu)-CO—(CH₂)₁₆- | | |
| | CO₂H)AQ-Me4Pal-AFIE-Me4Pal- | | |
| | LIEGGPSSGAPPPSGSEE-NH₂ | | |
| 956 | Y-Aib-QGTFTSD-4Pal-SR-αMeL-LDKK((2-[2-(2-Amino- | 962 | 5209.8 |
| | ethoxy)-ethoxy]-acetyl)-(γ-Glu)-CO—(CH₂)₁₆—CO₂H)AQ- | | |
| | Me4Pal-AFIE-Me4Pal-LIEGGPSSGAPPPSGSEE-NH₂ | | |
| 957 | Y-Aib-QGTFTSD-4Pal-SQ-αMeL-LDKK((γ-Glu)₂-CO— | 963 | 5165.7 |
| | (CH₂)₁₆—CO₂H)AQ-Me4Pal-AFIE-Me4Pal- | | |
| | LIEGGPSSGAPPPSGSEE-NH₂ | | |
| 958 | Y-Aib-QGTFTSD-4Pal-S-Orn-αMeL-LDKK((γ-Glu)₂-CO— | 964 | 5151.7 |
| | (CH₂)₁₆—CO₂H)AQ-Me4Pal-AFIE-Me4Pal- | | |
| | LIEGGPSSGAPPPSGSEE-NH₂ | | |
| 959 | Y-Aib-QGTFTSD-4Pal-SR-αMeL-LDKK((γ-Glu)₂-CO— | 965 | 5193.7 |
| | (CH₂)₁₆—CO₂H)AQ-Me4Pal-AFIE-Me4Pal- | | |
| | LIEGGPSSGAPPPSGSEE-NH₂ | | |
| 960 | Y-Aib-QGTFTSD-4Pal-SQ-αMeL-LDKK((γ-Glu)₂-CO— | 966 | 5109.6 |
| | (CH₂)₁₆—CO₂H)AQ-Me4Pal- | | |
| | AFIEYLIAGGPSSGAPPPSGSEE-NH₂ | | |
| 961 | Y-Aib-QGTFTSD-4Pal-S-Orn-αMeL-LDKK((γ-Glu)₂-CO— | 967 | 5095.6 |
| | (CH₂)₁₆—CO₂H)AQ-Me4Pal- | | |
| | AFIEYLIAGGPSSGAPPPSGSEE-NH₂ | | |
| 962 | Y-Aib-QGTFTSD-4Pal-SR-αMeL-LDKK((γ-Glu)₂-CO— | 968 | 5137.7 |
| | (CH₂)₁₆—CO₂H)AQ-Me4Pal- | | |
| | AFIEYLIAGGPSSGAPPPSGSEE-NH₂ | | |
| 963 | Y-Aib-QGTFTSD-4Pal-SQ-αMeL-LDKK((γ-Glu)₂-CO— | 969 | 5141.6 |
| | (CH₂)₁₆—CO₂H)AQ-Me4Pal- | | |
| | AFIEYLIAGGESSGAPPPSGSEE-NH₂ | | |
| 964 | Y-Aib-QGTFTSD-4Pal-S-Orn-αMeL-LDKK((γ-Glu)₂-CO— | 970 | 5127.6 |
| | (CH₂)₁₆—CO₂H)AQ-Me4Pal- | | |
| | AFIEYLIAGGESSGAPPPSGSEE-NH₂ | | |
| 965 | Y-Aib-QGTFTSD-4Pal-SR-αMeL-LDKK((γ-Glu)₂-CO— | 971 | 5169.7 |
| | (CH₂)₁₆—CO₂H)AQ-Me4Pal- | | |
| | AFIEYLIAGGESSGAPPPSGSEE-NH₂ | | |
| 966 | Y-Aib-QGTFTSD-4Pal-S-Orn-αMeL-LDKK((γ-Glu)₂-CO— | 972 | 5038.6 |
| | (CH₂)₁₆—CO₂H)AQ-Me4Pal-AFIE-αMeY- | | |
| | LIEGGPSSGAPPPSGSE-NH₂ | | |
| 967 | Y-Aib-QGTFTSD-4Pal-S-Orn-αMeL-LDKK((γ-Glu)₂-CO— | 973 | 5167.7 |
| | (CH₂)₁₆—CO₂H)AQ-Me4Pal-AFIE-αMeY- | | |
| | LIEGGPSSGAPPPSGSEE-NH₂ | | |
| 968 | Y-Aib-QGTFTSD-4Pal-SQ-αMeL-LDKK((γ-Glu)₂-CO— | 974 | 4908.4 |
| | (CH₂)₁₆—CO₂H)AQ-Me4Pal-AFIEYLIAGGPSSGEPPPSGS- | | |
| | NH₂ | | |
| 969 | Y-Aib-QGTFTSD-4Pal-SQ-αMeL-LDKK((γ-Glu)₂-CO— | 975 | 4892.4 |
| | (CH₂)₁₆—CO₂H)AQ-Me4Pal-AFIEYLIAGGPSSGAPPPEGS | | |
| 970 | Y-Aib-QGTFTSD-4Pal-SQ-αMeL-LDKK((γ-Glu)₂-CO— | 976 | 4951.5 |
| | (CH₂)₁₆—CO₂H)AQ-Me4Pal-AFIEYLIAGGPSSGEPPPEGS | | |
| 971 | Y-Aib-QGTFTSD-4Pal-SQ-αMeL-LDKK((γ-Glu)₂-CO— | 977 | 5095.6 |
| | (CH₂)₁₆—CO₂H)AQ-Me4Pal- | | |
| | AFIEYLIAGGPSSGEPPPSGSGE | | |
| 972 | Y-Aib-QGTFTSD-4Pal-S-Orn-αMeL-LD-Or-K((γ-Glu)₂- | 978 | 5209.8 |
| | CO—(CH₂)₁₆—CO₂H)AQ-Me4Pal-QFIE-αMeY- | | |
| | LIEGGPSSGAPPPSGSEE-NH₂ | | |
| 973 | Y-Aib-QGTFTSD-4Pal-S-Orn-αMeL-LD-Orn-K((γ-Glu)₂- | 979 | 5210.8 |
| | CO—(CH₂)₁₆—CO₂H)AQ-Me4Pal-EFIE-αMeY- | | |
| | LIEGGPSSGAPPPSGSEE-NH₂ | | |
| 974 | Y-Aib-QGTFTSD-4Pal-S-Orn-αMeL-LD-Orn-K((γ-Glu)₂- | 980 | 5195.8 |
| | CO—(CH₂)₁₆—CO₂H)AQ-Me4Pal-Orn-FIE-αMeY- | | |
| | LIEGGPSSGAPPPSGSEE-NH₂ | | |
| 975 | Y-Aib-QGTFTSD-4Pal-S-Orn-αMeL-LD-Orn-K((γ-Glu)₂- | 981 | 5209.8 |
| | CO—(CH₂)₁₆—CO₂H)AQ-Me4Pal-QFIE-αMeY- | | |
| | LLEGGPSSGAPPPSGSEE-NH₂ | | |
| 976 | Y-Aib-QGTFTSD-4Pal-S-Orn-αMeL-LD-Orn-K((γ-Glu)₂- | 982 | 5210.8 |
| | CO—(CH₂)₁₆—CO₂H)AQ-Me4Pal-EFIE-αMeY- | | |
| | LLEGGPSSGAPPPSGSEE-NH₂ | | |
| 977 | Y-Aib-QGTFTSD-4Pal-SQ-αMeL-LD-Orn-K((γ-Glu)₂-CO— | 983 | 5024.5 |
| | (CH₂)₁₆—CO₂H)AQ-Me4Pal- | | |
| | AFIEYLIAGGPSSGEPPPSGSE | | |
| 978 | Y-Aib-QGTFTSD-4Pal-SQ-αMeL-LD-Orn-K((γ-Glu)₂-CO— | 984 | 5081.6 |
| | (CH₂)₁₆—CO₂H)AQ-Me4Pal- | | |
| | AFIEYLIAGGPSSGEPPPSGSGE | | |
| 979 | Y-Aib-QGTFTSD-4Pal-S-Orn-αMeL-LDKK((γ-Glu)₂-CO— | 985 | 4936.5 |
| | (CH₂)₁₆—CO₂H)AQ-Me4Pal-AFIEYLIAGGPSSGEPPPSGE- | | |
| | NH₂ | | |
| 980 | Y-Aib-QGTFTSD-4Pal-S-Orn-αMeL-LDKK((γ-Glu)₂-CO— | 986 | 5037.6 |
| | (CH₂)₁₆—CO₂H)AQ-Me4Pal- | | |
| | AFIEYLIAGGPSSGEPPPSGTE-NH₂ | | |
| 981 | Y-Aib-QGTFTSD-4Pal-S-Orn-αMeL-LDKK((γ-Glu)₂-CO— | 987 | 5166.7 |
| | (CH₂)₁₆—CO₂H)AQ-Me4Pal- | | |
| | AFIEYLIAGGPSSGEPPPSGTEE-NH₂ | | |
| 982 | Y-Aib-QGTFTSD-4Pal-S-Orn-αMeL-LDKK((γ-Glu)₂-CO— | 988 | 5295.8 |
| | (CH₂)₁₆—CO₂H)AQ-Me4Pal- | | |
| | AFIEYLIAGGPSSGEPPPSGTEEE-NH₂ | | |
| 983 | Y-Aib-QGTFTSD-4Pal-S-Orn-αMeL-LD-Orn-K((γ-Glu)₂- | 989 | 4922.5 |
| | CO—(CH₂)₁₆—CO₂H)AQ-Me4Pal- | | |
| | AFIEYLIAGGPSSGEPPPSGE-NH₂ | | |
| 984 | Y-Aib-QGTFTSD-4Pal-S-Orn-αMeL-LD-Orn-K((γ-Glu)₂- | 990 | 5023.6 |
| | CO—(CH₂)₁₆—CO₂H)AQ-Me4Pal- | | |
| | AFIEYLIAGGPSSGEPPPSGTE-NH₂ | | |
| 985 | Y-Aib-QGTFTSD-4Pal-S-Orn-αMeL-LD-Orn-K((γ-Glu)₂- | 991 | 5152.7 |
| | CO—(CH₂)₁₆—CO₂H)AQ-Me4Pal- | | |
| | AFIEYLIAGGPSSGEPPPSGTEE-NH₂ | | |
| 986 | Y-Aib-QGTFTSD-4Pal-SQ-αMeL-LD-Orn-K((γ-Glu)₂-CO— | 992 | 5281.8 |
| | (CH₂)₁₆—CO₂H)AQ-Me4Pal- | | |
| | AFIEYLIAGGPSSGEPPPSGTEEE-NH₂ | | |
| 987 | Y-Aib-QGTFTSD-4Pal-S-Orn-αMeL-LDKK((2-[2-(2- | 993 | 5124.7 |
| | Amino-ethoxy)-ethoxy]-acetyl)-(γ-Glu)₂-CO—(CH₂)₁₆- | | |
| | CO₂H)AQ-Me4Pal-AFIE-Me4Pal-LIE-Aib- | | |
| | GPSSGEPPPSGS-NH₂ | | |
| 988 | Y-Aib-QGTFTSD-4Pal-S-Orn-αMeL-LDKK((2-[2-(2- | 994 | 5253.8 |
| | Amino-ethoxy)-ethoxy]-acetyl)-(γ-Glu)₂-CO—(CH₂)₁₆- | | |
| | CO₂H)AQ-Me4Pal-AFIE-Me4Pal-LIE-Aib- | | |
| | GPSSGEPPPSGSE-NH₂ | | |
| 989 | Y-Aib-QGTFTSD-4Pal-S-Orn-αMeL-LDKK((γ-Glu)₂-CO— | 995 | 4979.6 |
| | (CH₂)₁₆—CO₂H)AQ-Me4Pal-AFIE-Me4Pal-LIE-Aib- | | |
| | GPSSGEPPPSGS-NH₂ | | |
| 990 | Y-Aib-QGTFTSD-4Pal-S-Orn-αMeL-LDKK((γ-Glu)₂-CO— | 996 | 5108.7 |
| | (CH₂)₁₆—CO₂H)AQ-Me4Pal-AFIE-Me4Pal-LIE-Aib- | | |
| | GPSSGEPPPSGSE-NH₂ | | |
| 991 | Y-Aib-QGTFTSD-4Pal-S-Orn-αMeL-LD-Or-K((γ-Glu)₂- | 997 | 4965.5 |
| | CO—(CH₂)₁₆—CO₂H)AQ-Me4Pal-AFIE-Me4Pal-LIE-Aib- | | |
| | GPSSGEPPPSGS-NH₂ | | |
| 992 | Y-Aib-QGTFTSD-4Pal-S-Orn-αMeL-LD-Orn-K((γ-Glu)₂- | 998 | 5136.8 |
| | CO—(CH₂)₁₆—CO₂H)AQ-Me4Pal-QFIE-αMeY- | | |
| | LIAGGPSSGAPPPSGSEE-NH₂ | | |
| 993 | Y-Aib-QGTFTSD-4Pal-S-Orn-αMeL-LD-Orn-K((γ-Glu)₂- | 999 | 5137.7 |
| | CO—(CH₂)₁₆—CO₂H)AQ-Me4Pal-EFIE-αMeY- | | |
| | LIAGGPSSGAPPPSGSEE-NH₂ | | |
| 994 | Y-Aib-QGTFTSD-4Pal-S-Orn-αMeL-LD-Orn-K((γ-Glu)₂- | 1000 | 5122.8 |
| | CO—(CH₂)₁₆—CO₂H)AQ-Me4Pal-Orn-FIE-αMeY- | | |
| | LIAGGPSSGAPPPSGSEE-NH₂ | | |
| 995 | Y-Aib-QGTFTSD-4Pal-S-Orn-αMeL-LD-Orn-K((γ-Glu)₂- | 1001 | 5136.8 |
| | CO—(CH₂)₁₆—CO₂H)AQ-Me4Pal-QFIE-αMeY- | | |
| | LLAGGPSSGAPPPSGSEE-NH₂ | | |
| 996 | Y-Aib-QGTFTSD-4Pal-S-Orn-αMeL-LD-Orn-K((γ-Glu)₂- | 1002 | 5137.7 |
| | CO—(CH₂)₁₆—CO₂H)AQ-Me4Pal-EFIE-αMeY- | | |
| | LLAGGPSSGAPPPSGSEE-NH₂ | | |
| 997 | Y-Aib-QGTFTSD-4Pal-S-Orn-αMeL-LD-Orn-K((γ-Glu)₂- | 1003 | 5122.8 |
| | CO—(CH₂)₁₆—CO₂H)AQ-Me4Pal-Orn-FIE-αMeY- | | |
| | LLAGGPSSGAPPPSGSEE-NH₂ | | |
| 998 | Y-Aib-QGTFTSD-4Pal-SQ-αMeL-LD-Orn-K((γ-Glu)₂-CO— | 1004 | 5150.7 |
| | (CH₂)₁₆—CO₂H)AQ-Me4Pal-QFIE-αMeY- | | |
| | LLAGGPSSGAPPPSGSEE-NH₂ | | |
| 999 | Y-Aib-QGTFTSD-4Pal-SQ-αMeL-LD-Orn-K((γ-Glu)₂-CO— | 1005 | 5151.7 |
| | (CH₂)₁₆—CO₂H)AQ-Me4Pal-EFIE-αMeY- | | |
| | LLAGGPSSGAPPPSGSEE-NH₂ | | |
| 1000 | Y-Aib-QGTFTSD-4Pal-S-Orn-αMeL-LD-Orn-K((γ-Glu)₂- | 1006 | 5137.7 |
| | CO—(CH₂)₁₆—CO₂H)AQ-Me4Pal- | | |
| | QFIEYLIAGGPSSGAPPPSGSEE-NH₂ | | |
| 1001 | Y-Aib-QGTFTSD-4Pal-S-Orn-αMeL-LD-Orn-K((γ-Glu)₂- | 1007 | 5138.7 |
| | CO—(CH₂)₁₆—CO₂H)AQ-Me4Pal- | | |
| | EFIEYLIAGGPSSGAPPPSGSEE-NH₂ | | |
| 1002 | Y-Aib-QGTFTSD-4Pal-S-Orn-αMeL-LD-Orn-K((γ-Glu)₂- | 1008 | 5137.7 |
| | CO—(CH₂)₁₆—CO₂H)AQ-Me4Pal- | | |
| | QFIEYLLAGGPSSGAPPPSGSEE-NH₂ | | |
| 1003 | Y-Aib-QGTFTSD-4Pal-S-Orn-αMeL-LD-Orn-K((γ-Glu)₂- | 1009 | 5138.7 |
| | CO—(CH₂)₁₆—CO₂H)AQ-Me4Pal- | | |
| | EFIEYLLAGGPSSGAPPPSGSEE-NH₂ | | |
| 1004 | Y-Aib-QGTFTSD-4Pal-S-Orn-αMeL-LD-Orn-K((γ-Glu)₂- | 1010 | 5123.8 |
| | CO—(CH₂)₁₆—CO₂H)AQ-Me4Pal-Orn- | | |
| | FIEYLLAGGPSSGAPPPSGSEE-NH₂ | | |
| 1005 | Y-Aib-QGTFTSD-4Pal-SQ-αMeL-LD-Orn-K((γ-Glu)₂-CO— | 1011 | 5151.7 |
| | (CH₂)₁₆—CO₂H)AQ-Me4Pal- | | |
| | QFIEYLIAGGPSSGAPPPSGSEE-NH₂ | | |
| 1006 | Y-Aib-QGTFTSD-4Pal-SQ-αMeL-LD-Orn-K((γ-Glu)₂-CO— | 1012 | 5151.7 |
| | (CH₂)₁₆—CO₂H)AQ-Me4Pal- | | |
| | QFIEYLLAGGPSSGAPPPSGSEE-NH₂ | | |
| 1007 | Y-Aib-QGTFTSD-4Pal-SQ-αMeL-LD-Orn-K((γ-Glu)₂-CO— | 1013 | 4894.4 |
| | (CH₂)₁₆—CO₂H)AQ-Me4Pal-AFIEYLIAGGPSSGEPPPSGS- | | |
| | NH₂ | | |
| 1008 | Y-Aib-QGTFTSD-4Pal-SQ-αMeL-LD-Orn-K((γ-Glu)₂-CO— | 1014 | 5023.5 |
| | (CH₂)₁₆—CO₂H)AQ-Me4Pal- | | |
| | AFIEYLIAGGPSSGEPPPSGSE-NH₂ | | |
| 1009 | Y-Aib-QGTFTSD-4Pal-S-Orn-αMeL-LDK-K((γ-Glu)₂-CO— | 1015 | 4965.5 |
| | (CH₂)₁₆—CO₂H)AQ-Me4Pal- | | |
| | AFIEYLIAGGPSSGAPPPSGSE-NH₂ | | |
| 1010 | Y-Aib-QGTFTSD-4Pal-S-Orn-αMeL-LDK-K((γ-Glu)₂-CO— | 1016 | 5007.6 |
| | (CH₂)₁₆—CO₂H)AQ-Me4Pal- | | |
| | AFIEYLIAGGPSSGAPPPSESE-NH₂ | | |
| 1011 | Y-Aib-QGTFTSD-4Pal-S-Orn-αMeL-LD-Orn-K((γ-Glu)₂- | 1017 | 4951.5 |
| | CO—(CH₂)₁₆—CO₂H)AQ-Me4Pal- | | |
| | AFIEYLIAGGPSSGAPPPSGSE-NH₂ | | |
| 1012 | Y-Aib-QGTFTSD-4Pal-S-Orn-αMeL-LD-Orn-K((γ-Glu)₂- | 1018 | 4993.5 |
| | CO—(CH₂)₁₆—CO₂H)AQ-Me4Pal- | | |
| | AFIEYLIAGGPSSGAPPPSESE-NH₂ | | |
| 1013 | Y-Aib-QGTFTSD-4Pal-S-Orn-αMeL-LD-Or-K((γ-Glu)₂- | 1019 | 4894.5 |
| | CO—(CH₂)₁₆—CO₂H)AQ-Me4Pal-AFIE-αMeY- | | |
| | LIEGGPSSGAPPPSGS-NH₂ | | |
| 1014 | Y-Aib-QGTFTSD-4Pal-S-Orn-αMeL-LDKK((γ-Glu)₂-CO— | 1020 | 4908.5 |
| | (CH₂)₁₆—CO₂H)AQ-Me4Pal-AFIE-αMeY- | | |
| | LIAGGPSSGEPPPSGS-NH₂ | | |
| 1015 | Y-Aib-QGTFTSD-4Pal-S-Orn-αMeL-LDKK((γ-Glu)₂-CO— | 1021 | 4892.6 |
| | (CH₂)₁₆—CO₂H)AQ-Me4Pal-AFIE-αMeY- | | |
| | LIAGGPSSGAPPPEGS-NH₂ | | |
| 1016 | Y-Aib-QGTFTSD-4Pal-SQ-αMeL-LD-Orn-K((2-[2-(2- | 1022 | 5053.7 |
| | Amino-ethoxy)-ethoxy]-acetyl)-(γ-Glu)₂-CO—(CH₂)₁₆- | | |
| | CO₂H)AQ-Me4Pal-AFIEYLIEaGPSSGAPPPSGS-NH₂ | | |
| 1017 | Y-Aib-QGTFTSD-4Pal-SQ-αMeL-LD-Orn-K((γ-Glu)₂-CO— | 1023 | 4908.5 |
| | (CH₂)₁₆—CO₂H)AQ-Me4Pal-AFIEYLIEaGPSSGAPPPSGS- | | |
| | NH₂ | | |
| 1018 | Y-Aib-QGTFTSD-4Pal-SQ-αMeL-LD-Orn-K((2-[2-(2- | 1024 | 5111.7 |
| | Amino-ethoxy)-ethoxy]-acetyl)-(γ-Glu)₂-CO—(CH₂)₁₆- | | |
| | CO₂H)AQ-Me4Pal-AFIEYLIEaGPSSGEPPPSGS-NH₂ | | |
| 1019 | Y-Aib-QGTFTSD-4Pal-SQ-αMeL-LD-Orn-K((γ-Glu)₂-CO— | 1025 | 4966.5 |
| | (CH₂)₁₆—CO₂H)AQ-Me4Pal-AFIEYLIEaGPSSGEPPPSGS- | | |
| | NH₂ | | |
| 1020 | Y-Aib-QGTFTSD-4Pal-SQ-αMeL-LD-Orn-K((2-[2-(2- | 1026 | 5095.7 |
| | Amino-ethoxy)-ethoxy]-acetyl)-(γ-Glu)₂-CO—(CH₂)₁₆- | | |
| | CO₂H)AQ-Me4Pal-AFIEYLIEaGPSSGAPPPEGS-NH₂ | | |
| 1021 | Y-Aib-QGTFTSD-4Pal-SQ-αMeL-LD-Orn-K((γ-Glu)₂-CO— | 1027 | 4950.5 |
| | (CH₂)₁₆—CO₂H)AQ-Me4Pal-AFIEYLIEaGPSSGAPPPEGS- | | |
| | NH₂ | | |
| 1022 | Y-Aib-QGTFTSD-4Pal-SQ-αMeL-LD-Orn-K((2-[2-(2- | 1028 | 5182.8 |
| | Amino-ethoxy)-ethoxy]-acetyl)-(γ-Glu)₂-CO—(CH₂)₁₆- | | |
| | CO₂H)AQ-Me4Pal-AFIEYLIEaGPSSGAPPPSGSE-NH₂ | | |
| 1023 | Y-Aib-QGTFTSD-4Pal-SQ-αMeL-LD-Orn-K((γ-Glu)₂-CO— | 1029 | 5037.6 |
| | (CH₂)₁₆—CO₂H)AQ-Me4Pal- | | |
| | AFIEYLIEaGPSSGAPPPSGSE-NH₂ | | |
| 1024 | Y-Aib-QGTFTSD-4Pal-SQ-αMeL-LDKK((2-[2-(2-Amino- | 1030 | 5196.8 |
| | ethoxy)-ethoxy]-acetyl)-(γ-Glu)₂-CO—(CH₂)₁₆—CO₂H)AQ- | | |
| | Me4Pal-AFIEYLIEaGPSSGAPPPSGSE-NH₂ | | |
| 1025 | Y-Aib-QGTFTSD-4Pal-SQ-αMeL-LDKK((γ-Glu)₂-CO— | 1031 | 5051.6 |
| | (CH₂)₁₆—CO₂H)AQ-Me4Pal- | | |
| | AFIEYLIEaGPSSGAPPPSGSE-NH₂ | | |
| 1026 | Y-Aib-QGTFTSD-4Pal-SQ-αMeL-LD-Orn-K((γ-Glu)₂-CO— | 1032 | 5281.8 |
| | (CH₂)₁₆—CO₂H)AQ-Me4Pal-QFIE-αMeY- | | |
| | LIEGGPSSGEPPPSGSEE-NH₂ | | |
| 1027 | Y-Aib-QGTFTSD-4Pal-SQ-αMeL-LD-Orn-K((γ-Glu)₂-CO— | 1033 | 5224.8 |
| | (CH₂)₁₆—CO₂H)AQ-Me4Pal-AFIE-αMeY- | | |
| | LIEGGPSSGEPPPSGSEE-NH₂ | | |
| 1028 | Y-Aib-QGTFTSD-4Pal-SQ-αMeL-LD-Orn-K((γ-Glu)₂- | 1034 | 5224.8 |
| | (Glu)-CO—(CH₂)₁₆—CO₂H)AQ-Me4Pal-AFIE-αMeY- | | |
| | LIEGGPSSGEPPPSGSEE-NH₂ | | |
| 1029 | Y-Aib-QGTFTSD-4Pal-SQ-αMeL-LDKK((2-[2-(2-Amino- | 1035 | 5124.7 |
| | ethoxy)-ethoxy]-acetyl)-(γ-Glu)-CO—(CH₂)₁₆—CO₂H)AQ- | | |
| | Me4Pal-AFIEYLIAGGPSSGAPPPSGSEE-NH₂ | | |
| 1030 | Y-Aib-QGTFTSD-4Pal-SQ-αMeL-LDKK((Glu)-(γ-Glu)- | 1036 | 5108.7 |
| | CO—(CH₂)₁₆—CO₂H)AQ-Me4Pal- | | |
| | AFIEYLIAGGPSSGAPPPSGSEE-NH₂ | | |
| 1031 | Y-Aib-QGTFTSD-4Pal-SQ-αMeL-LD-Orn-K((γ-Glu)₂-CO— | 1037 | 5094.7 |
| | (CH₂)₁₆—CO₂H)AQ-Me4Pal- | | |
| | AFIEYLIAGGPSSGAPPPSGSEE-NH₂ | | |
| 1032 | Y-Aib-QGTFTSD-4Pal-SQ-αMeL-LD-Orn-KK((Glu)-(γ- | 1038 | 5110.7 |
| | Glu)-CO—(CH₂)₁₆—CO₂H)AQ-Me4Pal- | | |
| | AFIEYLIAGGPSSGAPPPSGSEE-NH₂ | | |
| 1033 | Y-Aib-QGTFTSD-4Pal-SQ-αMeL-LD-Orn-K((Glu)₂-(γ- | 1039 | 5094.7 |
| | Glu)-CO—(CH₂)₁₆—CO₂H)AQ-Me4Pal- | | |
| | AFIEYLIAGGPSSGAPPPSGSEE-NH₂ | | |
| 1034 | Y-Aib-QGTFTSD-4Pal-SQ-αMeL-LD-Orn-K(e-(Glu)₂-CO— | 1040 | 5223.8 |
| | (CH₂)₁₆—CO₂H)AQ-Me4Pal- | | |
| | AFIEYLIAGGPSSGAPPPSGSEE-NH₂ | | |
| 1035 | Y-Aib-QGTFTSD-4Pal-SQ-αMeL-LD-Orn-K((γ-Glu)₂-CO— | 1041 | 5094.7 |
| | (CH₂)₁₆—CO₂H)AQ-Me4Pal- | | |
| | AFIEYLIAGGPSSGAPPPSGSEE-NH₂ | | |
| 1036 | Y-Aib-QGTFTSD-4Pal-SQ-αMeL-LDKK((γ-Glu)₂-CO— | 1042 | 5108.7 |
| | (CH₂)₁₆—CO₂H)AQ-Me4Pal- | | |
| | AFIEYLLAGGPSSGAPPPSGSEE-NH₂ | | |
| 1037 | Y-Aib-QGTFTSD-4Pal-SQ-αMeL-LDKK((2-[2-(2-Amino- | 1043 | 5124.7 |
| | ethoxy)-ethoxy]-acetyl)-(γ-Glu)-CO—(CH₂)₁₆—CO₂H)AQ- | | |
| | Me4Pal-AFIEYLLAGGPSSGAPPPSGSEE-NH₂ | | |
| 1038 | Y-Aib-QGTFTSDFSQ-αMeL-LD-Orn-K((2-[2-(2-Amino- | 1044 | 5233.8 |
| | ethoxy)-ethoxy]-acetyl)-(γ-Glu)-CO—(CH₂)₁₆—CO₂H)AQ- | | |
| | Aib-AFIEYLLEaGPSSGAPPPSGSEEE-NH₂ | | |
| 1039 | Y-Aib-QGTFTSDFSQ-αMeL-LD-Orn-K((γ-Glu)₂-CO— | 1045 | 5217.8 |
| | (CH₂)₁₆—CO₂H)AQ-Aib-AFIEYLLEaGPSSGAPPPSGSEEE- | | |
| | NH₂ | | |
| 1040 | Y-Aib-QGTFTSDFSQ-αMeL-LD-Orn-K((γ-Glu)₂-CO— | 1046 | 5216.8 |
| | (CH₂)₁₆—CO₂H)AQ-Aib-AFIE-Me4Pal- | | |
| | LLEaGPSSGAPPPSGSEEE-NH₂ | | |
| 1041 | Y-Aib-QGTFTSD-4Pal-SQ-αMeL-LD-Orn-K((2-[2-(2- | 1047 | 5182.8 |
| | Amino-ethoxy)-ethoxy]-acetyl)-(γ-Glu)-CO—(CH₂)₁₆- | | |
| | CO₂H)AQ-Me4Pal-AFIE-αMeY- | | |
| | LIEGGPSSGAPPPSGSEE-NH₂ | | |
| 1042 | Y-Aib-QGTFTSD-4Pal-SQ-αMeL-LD-Orn-K((2-[2-(2- | 1048 | 5182.8 |
| | Amino-ethoxy)-ethoxy]-acetyl)-(γ-Glu)-CO—(CH₂)₁₆- | | |
| | CO₂H)AQ-Me4Pal-AFIe-αMeY-LIEGGPSSGAPPPSGSEE- | | |
| | NH₂ | | |
| 1043 | Y-Aib-QGTFTSD-4Pal-SQ-αMeL-LD-Orn-K((γ-Glu)₂-CO— | 1049 | 5166.7 |
| | (CH₂)₁₆—CO₂H)AQ-Me4Pal-AFIE-αMeY- | | |
| | LIEGGPSSGAPPPSGSEE-NH₂ | | |
| 1044 | Y-Aib-QGTFTSD-4Pal-SQ-αMeL-LD-Orn-K((γ-Glu)₂-CO— | 1050 | 5166.7 |
| | (CH₂)₁₆—CO₂H)AQ-Me4Pal-AFIe-αMeY- | | |
| | LIEGGPSSGAPPPSGSEE-NH₂ | | |
| 1045 | Y-Aib-QGTFTSD-4Pal-SQ-αMeL-LD-Orn-K((2-[2-(2- | 1051 | 5239.8 |
| | Amino-ethoxy)-ethoxy]-acetyl)-(γ-Glu)-CO—(CH₂)₁₆- | | |
| | CO₂H)AQ-Me4Pal-QFIE-αMeY- | | |
| | LIEGGPSSGAPPPSGSEE-NH₂ | | |
| 1046 | Y-Aib-QGTFTSD-4Pal-SQ-αMeL-LD-Orn-K((γ-Glu)₂-CO— | 1052 | 5223.8 |
| | (CH₂)₁₆—CO₂H)AQ-Me4Pal-QFIE-αMeY- | | |
| | LIEGGPSSGAPPPSGSEE-NH₂ | | |
| 1047 | Y-Aib-QGTFTSDFS-Orn-αMeL-LDKK((γ-Glu)₂-CO— | 1053 | 5074.7 |
| | (CH₂)₁₆—CO₂H)AQ-Aib-AFIEYLLEGGPSSGAPPPGGSEE- | | |
| | NH₂ | | |
| 1048 | Y-Aib-QGTFTSDFS-Orn-αMeL-LD-Orn-K((γ-Glu)₂-CO— | 1054 | 5060.7 |
| | (CH₂)₁₆—CO₂H)AQ-Aib-AFIEYLLEGGPSSGAPPPGGSEE- | | |
| | NH₂ | | |
| 1049 | Y-Aib-QGTFTSDFS-Orn-αMeL-LD-Orn-K((γ-Glu)₂-CO— | 1055 | 5074.7 |
| | (CH₂)₁₆—CO₂H)AQ-Aib-AFIE-αMeY- | | |
| | LLEGGPSSGAPPPGGSEE-NH₂ | | |
| 1050 | Y-Aib-QGTFTSDFS-Orn-αMeL-LD-Orn-K((γ-Glu)₂-CO— | 1056 | 5059.7 |
| | (CH₂)₁₆—CO₂H)AQ-Aib-AFIE-Me4Pal- | | |
| | LLEGGPSSGAPPPGGSEE-NH₂ | | |
| 1051 | Y-Aib-QGTFTSDFS-Orn-αMeL-LDKK((γ-Glu)₂-CO— | 1057 | 5016.6 |
| | (CH₂)₁₆—CO₂H)AQ-Aib-AFIEYLLAGGPSSGAPPPEGSEE- | | |
| | NH₂ | | |
| 1052 | Y-Aib-QGTFTSDFS-Orn-αMeL-LD-Orn-K((γ-Glu)₂-CO— | 1058 | 5002.6 |
| | (CH₂)₁₆—CO₂H)AQ-Aib-AFIEYLLAGGPSSGAPPPEGSEE- | | |
| | NH₂ | | |
| 1053 | Y-Aib-QGTFTSDFS-Orn-αMeL-LD-Orn-K((γ-Glu)₂-CO— | 1059 | 5001.6 |
| | (CH₂)₁₆—CO₂H)AQ-Aib-AFIE-Me4Pal- | | |
| | LLAGGPSSGAPPPEGSEE-NH₂ | | |
| 1054 | Y-Aib-QGTFTSD-4Pal-S-Dab-αMeL-LD-Orn-K((γ-Glu)₂- | 1060 | 5061.6 |
| | CO—(CH₂)₁₆—CO₂H)AQ-Aib-AFIE-Me4Pal- | | |
| | LLAGGPSSGAPPPEGSEE-NH₂ | | |
| 1055 | Y-Aib-QGTFTSD-4Pal-S-Dab-αMeL-LD-Orn-K((γ-Glu)₂- | 1061 | 5138.7 |
| | CO—(CH₂)₁₆—CO₂H)AQ-Me4Pal-AFIE-Me4Pal- | | |
| | LLAGGPSSGAPPPEGSEE-NH₂ | | |
| 1056 | Y-Aib-QGTFTSD-4Pal-SQ-αMeL-LD-Orn-K((γ-Glu)₂-CO— | 1062 | 5094.7 |
| | (CH₂)₁₆—CO₂H)AQ-Me4Pal- | | |
| | AFIEYLLAGGPSSGAPPPSGSEE-NH₂ | | |
| 1057 | Y-Aib-QGTFTSD-4Pal-SQ-αMeL-LD-Orn-K((Glu)-(γ- | 1063 | 5094.7 |
| | Glu)-CO—(CH₂)₁₆—CO₂H)AQ-Me4Pal- | | |
| | AFIEYLLAGGPSSGAPPPSGSEE-NH₂ | | |
| 1058 | Y-Aib-QGTFTSD-4Pal-SQ-αMeL-LD-Orn-K(e-(γ-Glu)- | 1064 | 5166.7 |
| | CO—(CH₂)₁₆—CO₂H)AQ-Me4Pal-AFIE-αMeY- | | |
| | LLEGGPSSGAPPPSGSEE-NH₂ | | |
| 1059 | Y-Aib-QGTFTSD-4Pal-S-Orn-αMeL-LD-Orn-K((γ-Glu)₂- | 1065 | 5080.7 |
| | CO—(CH₂)₁₆—CO₂H)AQ-Me4Pal- | | |
| | AFIEYLIAGGPSSGAPPPSGSEE-NH₂ | | |
| 1060 | Y-Aib-QGTFTSD-4Pal-S-Orn-αMeL-LDKK((Glu)-(γ-Glu)- | 1066 | 5094.7 |
| | CO—(CH₂)₁₆—CO₂H)AQ-Me4Pal- | | |
| | AFIEYLIAGGPSSGAPPPSGSEE-NH₂ | | |
| 1061 | Y-Aib-QGTFTSD-4Pal-S-Orn-αMeL-LD-Orn-K((Glu)-(γ- | 1067 | 5080.7 |
| | Glu)-CO—(CH₂)₁₆—CO₂H)AQ-Me4Pal- | | |
| | AFIEYLIAGGPSSGAPPPSGSEE-NH₂ | | |
| 1062 | Y-Aib-QGTFTSD-4Pal-S-Orn-αMeL-LD-Orn-K((Glu)₂-(γ- | 1068 | 5209.8 |
| | Glu)-CO—(CH₂)₁₆—CO₂H)AQ-Me4Pal- | | |
| | AFIEYLIAGGPSSGAPPPSGSEE-NH₂ | | |
| 1063 | Y-Aib-QGTFTSD-4Pal-S-Orn-αMeL-LD-Orn-K(e-(γ-Glu)- | 1069 | 5080.7 |
| | CO—(CH₂)₁₆—CO₂H)AQ-Me4Pal- | | |
| | AFIEYLIAGGPSSGAPPPSGSEE-NH₂ | | |
| 1064 | Y-Aib-QGTFTSD-4Pal-S-Orn-αMeL-LD-Orn-K((γ-Glu)₂- | 1070 | 5075.7 |
| | CO—(CH₂)₁₆—CO₂H)AQ-Aib-AFIE-αMeY- | | |
| | LLEGGPSSGAPPPSGSEE-NH₂ | | |
| 1065 | Y-Aib-QGTFTSD-4Pal-S-Orn-αMeL-LD-Orn-K(e-(γ-Glu)- | 1071 | 5075.7 |
| | CO—(CH₂)₁₆—CO₂H)AQ-Aib-AFIE-αMeY- | | |
| | LLEGGPSSGAPPPSGSEE-NH₂ | | |
| 1066 | Y-Aib-QGTFTSD-4Pal-S-Orn-αMeL-LD-Orn-K((Glu)-(γ- | 1072 | 5075.7 |
| | Glu)-CO—(CH₂)₁₆—CO₂H)AQ-Aib-AFIE-αMeY- | | |
| | LLEGGPSSGAPPPSGSEE-NH₂ | | |
| 1067 | Y-Aib-QGTFTSD-4Pal-S-Orn-αMeL-LD-Orn-K((Glu)₂-(γ- | 1073 | 5204.8 |
| | Glu)-CO—(CH₂)₁₆—CO₂H)AQ-Aib-AFIE-αMeY- | | |
| | LLEGGPSSGAPPPSGSEE-NH₂ | | |
| 1068 | Y-Aib-QGTFTSD-4Pal-S-Orn-αMeL-LD-Orn-K((γ-Glu)₂- | 1074 | 5080.7 |
| | CO—(CH₂)₁₆—CO₂H)AQ-Me4Pal- | | |
| | AFIEYLLAGGPSSGAPPPSGSEE-NH₂ | | |
| 1069 | Y-Aib-QGTFTSD-4Pal-S-Orn-αMeL-LD-Or-K((γ-Glu)₂- | 1075 | 5003.6 |
| | CO—(CH₂)₁₆—CO₂H)AQ-Aib- | | |
| | AFIEYLLAGGPSSGAPPPSGSEE-NH₂ | | |
| 1070 | Y-Aib-QGTFTSD-4Pal-SQ-αMeL-LD-Orn-K(e-(γ-Glu)- | 1076 | 5166.7 |
| | CO—(CH₂)₁₆—CO₂H)AQ-Me4Pal-AFIE-αMeY- | | |
| | LIEGGPSSGAPPPSGSEE-NH₂ | | |
| 1071 | Y-Aib-QGTFTSD-4Pal-SQ-αMeL-LD-Orn-K(e-(γ-Glu)- | 1077 | 5295.9 |
| | CO—(CH₂)₁₆—CO₂H)AQ-Me4Pal-AFIE-αMeY- | | |
| | LIEGGPSSGAPPPSGSEEE-NH₂ | | |
| 1072 | Y-Aib-QGTFTSD-4Pal-SQ-αMeL-LD-Orn-K(e-(γ-Glu)- | 1078 | 5165.8 |
| | CO—(CH₂)₁₆—CO₂H)AQ-Me4Pal-AFIQ-αMeY- | | |
| | LIEGGPSSGAPPPSGSEE-NH₂ | | |
| 1073 | Y-Aib-QGTFTSD-4Pal-SQ-αMeL-LD-Orn-K(e-(γ-Glu)- | 1079 | 5294.9 |
| | CO—(CH₂)₁₆—CO₂H)AQ-Me4Pal-AFIQ-αMeY- | | |
| | LIEGGPSSGAPPPSGSEEE-NH₂ | | |
| 1074 | Y-Aib-QGTFTSD-4Pal-SQ-αMeL-LD-Orn-K(e-(γ-Glu)- | 1080 | 5108.7 |
| | CO—(CH₂)₁₆—CO₂H)AQ-Me4Pal-AFIE-αMeY- | | |
| | LIAGGPSSGAPPPSGSEE-NH₂ | | |
| 1075 | Y-Aib-QGTFTSD-4Pal-SQ-αMeL-LD-Orn-K(e-(γ-Glu)- | 1081 | 5237.8 |
| | CO—(CH₂)₁₆—CO₂H)AQ-Me4Pal-AFIE-αMeY- | | |
| | LIAGGPSSGAPPPSGSEEE-NH₂ | | |
| 1076 | Y-Aib-QGTFTSD-4Pal-SQ-αMeL-LD-Orn-K(e-(γ-Glu)- | 1082 | 5294.9 |
| | CO—(CH₂)₁₆—CO₂H)AQ-Me4Pal-AFIQ-αMeY- | | |
| | LIEGGPSSGAPPPSGSEEE-NH₂ | | |
| 1077 | Y-Aib-QGTFTSD-4Pal-SQ-αMeL-LD-Orn-K((Glu)-(γ- | 1083 | 5294.9 |
| | Glu)-CO—(CH₂)₁₆—CO₂H)AQ-Me4Pal-AFIQ-αMeY- | | |
| | LIEGGPSSGAPPPSGSEEE-NH₂ | | |
| 1078 | Y-Aib-QGTFTSD-4Pal-SQ-αMeL-LD-Orn-KK((Glu)₂-(γ- | 1084 | 5424.0 |
| | Glu)-CO—(CH₂)₁₆—CO₂H)AQ-Me4Pal-AFIQ-αMeY- | | |
| | LIEGGPSSGAPPPSGSEEE-NH₂ | | |
| 1079 | Y-Aib-QGTFTSD-4Pal-SQ-αMeL-LD-Orn-K((Glu)-(γ- | 1085 | 5237.8 |
| | Glu)₂-CO—(CH₂)₁₆—CO₂H)AQ-Me4Pal-AFIE-αMeY- | | |
| | LIAGGPSSGAPPPSGSEEE-NH₂ | | |
| 1080 | Y-Aib-QGTFTSD-4Pal-SQ-αMeL-LD-Orn-K((Glu)₂-(γ- | 1086 | 5366.9 |
| | Glu)₂-CO—(CH₂)₁₆—CO₂H)AQ-Me4Pal-AFIE-αMeY- | | |
| | LIAGGPSSGAPPPSGSEEE-NH₂ | | |
| 1081 | Y-Aib-QGTFTSD-4Pal-SQ-αMeL-LD-Orn-K(e-(γ-Glu)- | 1087 | 5294.9 |
| | CO—(CH₂)₁₆—CO₂H)AQ-Me4Pal-QFIE-αMeY- | | |
| | LIAGGPSSGAPPPSGSEEE-NH₂ | | |
| 1082 | Y-Aib-QGTFTSD-4Pal-SQ-αMeL-LD-Orn-K(e-(γ-Glu)- | 1088 | 5237.8 |
| | CO—(CH₂)₁₆—CO₂H)AQ-Me4Pal-AFIE-αMeY- | | |
| | LLAGGPSSGAPPPSGSEEE-NH₂ | | |
| 1083 | Y-Aib-QGTFTSD-4Pal-SQ-αMeL-LD-Orn-K(e-(γ-Glu)- | 1089 | 5294.9 |
| | CO—(CH₂)₁₆—CO₂H)AQ-Me4Pal-AFIQ-αMeY- | | |
| | LLEGGPSSGAPPPSGSEEE-NH₂ | | |
| 1084 | Y-Aib-QGTFTSD-4Pal-SQ-αMeL-LD-Orn-K(e-(γ-Glu)- | 1090 | 5294.9 |
| | CO—(CH₂)₁₆—CO₂H)AQ-Me4Pal-QFIE-αMeY- | | |
| | LLAGGPSSGAPPPSGSEEE-NH₂ | | |
| 1085 | Y-Aib-QGTFTSD-4Pal-SQ-αMeL-LDKK(e-(γ-Glu)-CO— | 1091 | 4892.5 |
| | (CH₂)₁₆—CO₂H)AQ-Me4Pal-AFIEYLIAGGPSSGAPPPSGE- | | |
| | NH₂ | | |
| 1086 | Y-Aib-QGTFTSD-4Pal-SQ-αMeL-LDKK((Glu)-(γ-Glu)- | 1092 | 4892.5 |
| | CO—(CH₂)₁₆—CO₂H)AQ-Me4Pal- | | |
| | AFIEYLIAGGPSSGAPPPSGE-NH₂ | | |
| 1087 | Y-Aib-QGTFTSD-4Pal-SQ-αMeL-LDKK((Glu)₂-(γ-Glu)- | 1093 | 5021.6 |
| | CO—(CH₂)₁₆—CO₂H)AQ-Me4Pal- | | |
| | AFIEYLIAGGPSSGAPPPSGE-NH₂ | | |
| 1088 | Y-Aib-QGTFTSD-4Pal-SQ-αMeL-LDKK(e-(γ-Glu)-CO— | 1094 | 5150.7 |
| | (CH₂)₁₆—CO₂H)AQ-Me4Pal- | | |
| | AFIEYLIAGGPSSGAPPPSGEEE-NH₂ | | |
| 1089 | Y-Aib-QGTFTSD-4Pal-SQ-αMeL-LDKK((Glu)-(γ-Glu)- | 1095 | 5150.7 |
| | CO—(CH₂)₁₆—CO₂H)AQ-Me4Pal- | | |
| | AFIEYLIAGGPSSGAPPPSGEEE-NH₂ | | |
| 1090 | Y-Aib-QGTFTSD-4Pal-SQ-αMeL-LDKK((Glu)₂-(γ-Glu)- | 1096 | 5279.9 |
| | CO—(CH₂)₁₆—CO₂H)AQ-Me4Pal- | | |
| | AFIEYLIAGGPSSGAPPPSGEEE-NH₂ | | |
| 1091 | Y-Aib-QGTFTSD-4Pal-SQ-αMeL-LD-Orn-K((γ-Glu)₂-CO— | 1097 | 5122.7 |
| | (CH₂)₁₆—CO₂H)AQ-Me4Pal-AFIEYLIA-Aib- | | |
| | GPSSGAPPPSGSEE-NH₂ | | |
| 1092 | Y-Aib-QGTFTSD-4Pal-SQ-αMeL-LD-Orn-K((γ-Glu)₂-CO— | 1098 | 5180.8 |
| | (CH₂)₁₆—CO₂H)AQ-Me4Pal-AFIEYLIA-Aib- | | |
| | GPSSGEPPPSGSEE-NH₂ | | |
| 1093 | Y-Aib-QGTFTSD-4Pal-SQ-αMeL-LD-Orn-K((γ-Glu)₂-CO— | 1099 | 5252.8 |
| | (CH₂)₁₆—CO₂H)AQ-Me4Pal-AFIE-αMeY-LIE-Aib- | | |
| | GPSSGEPPPSGSEE-NH₂ | | |
| 1094 | Y-Aib-QGTFTSD-4Pal-SQ-αMeL-LD-Orn-K((γ-Glu)₂-CO— | 1100 | 5194.8 |
| | (CH₂)₁₆—CO₂H)AQ-Me4Pal-AFIE-αMeY-LIA-Aib- | | |
| | GPSSGEPPPSGSEE-NH₂ | | |
| 1095 | Y-Aib-QGTFTSD-4Pal-SQ-αMeL-LD-Orn-K((2-[2-(2- | 1101 | 5196.8 |
| | Amino-ethoxy)-ethoxy]-acetyl)-(γ-Glu)-CO—(CH₂)₁₆- | | |
| | CO₂H)AQ-Me4Pal-AFIEYLIA-Aib-GPSSGEPPPSGSEE- | | |
| | NH₂ | | |
| 1096 | Y-Aib-QGTFTSD-4Pal-SQ-αMeL-LD-Orn-K((2-[2-(2- | 1102 | 5253.9 |
| | Amino-ethoxy)-ethoxy]-acetyl)-(γ-Glu)-CO—(CH₂)₁₆- | | |
| | CO₂H)AQ-Me4Pal-AFIEYLIQ-Aib-GPSSGEPPPSGSEE- | | |
| | NH₂ | | |
| 1097 | Y-Aib-QGTFTSD-4Pal-SQ-αMeL-LD-Orn-K((2-[2-(2- | 1103 | 5268.9 |
| | Amino-ethoxy)-ethoxy]-acetyl)-(γ-Glu)-CO—(CH₂)₁₆- | | |
| | CO₂H)AQ-Me4Pal-AFIE-αMeY-LIE-Aib- | | |
| | GPSSGEPPPSGSEE-NH₂ | | |
| 1098 | Y-Aib-QGTFTSD-4Pal-SQ-αMeL-LD-Orn-K((2-[2-(2- | 1104 | 5325.9 |
| | Amino-ethoxy)-ethoxy]-acetyl)-(γ-Glu)-CO—(CH₂)₁₆- | | |
| | CO₂H)AQ-Me4Pal-QFIE-αMeY-LIE-Aib- | | |
| | GPSSGEPPPSGSEE-NH₂ | | |
| 1099 | Y-Aib-QGTFTSD-4Pal-SQ-αMeL-LD-Orn-K((2-[2-(2- | 1105 | 5210.8 |
| | Amino-ethoxy)-ethoxy]-acetyl)-(γ-Glu)-CO—(CH₂)₁₆- | | |
| | CO₂H)AQ-Me4Pal-AFIE-αMeY-LIA-Aib- | | |
| | GPSSGEPPPSGSEE-NH₂ | | |
| 1100 | Y-Aib-QGTFTSD-4Pal-SQ-αMeL-LD-Orn-K((2-[2-(2- | 1106 | 5267.9 |
| | Amino-ethoxy)-ethoxy]-acetyl)-(γ-Glu)-CO—(CH₂)₁₆- | | |
| | CO₂H)AQ-Me4Pal-QFIE-αMeY-LIA-Aib- | | |
| | GPSSGEPPPSGSEE-NH₂ | | |
| 1101 | Y-Aib-QGTFTSD-4Pal-SQ-αMeL-LD-Orn-K(e-(γ-Glu)- | 1107 | 5180.8 |
| | CO—(CH₂)₁₆—CO₂H)AQ-Me4Pal-AFIEYLIA-Aib- | | |
| | GPSSGEPPPSGSEE-NH₂ | | |
| 1102 | Y-Aib-QGTFTSD-4Pal-SQ-αMeL-LD-Orn-K(e-(γ-Glu)- | 1108 | 5237.8 |
| | CO—(CH₂)₁₆—CO₂H)AQ-Me4Pal-AFIEYLIQ-Aib- | | |
| | GPSSGEPPPSGSEE-NH₂ | | |
| 1103 | Y-Aib-QGTFTSD-4Pal-SQ-αMeL-LD-Orn-K(e-(γ-Glu)- | 1109 | 5252.8 |
| | CO—(CH₂)₁₆—CO₂H)AQ-Me4Pal-AFIE-αMeY-LIE-Aib- | | |
| | GPSSGEPPPSGSEE-NH₂ | | |
| 1104 | Y-Aib-QGTFTSD-4Pal-SQ-αMeL-LD-Orn-K(e-(γ-Glu)- | 1110 | 5309.9 |
| | CO—(CH₂)₁₆—CO₂H)AQ-Me4Pal-QFIE-αMeY-LIE-Aib- | | |
| | GPSSGEPPPSGSEE-NH₂ | | |
| 1105 | Y-Aib-QGTFTSD-4Pal-SQ-αMeL-LD-Orn-K(e-(γ-Glu)- | 1111 | 5194.8 |
| | CO—(CH₂)₁₆—CO₂H)AQ-Me4Pal-AFIE-αMeY-LIA-Aib- | | |
| | GPSSGEPPPSGSEE-NH₂ | | |
| 1106 | Y-Aib-QGTFTSD-4Pal-SQ-αMeL-LD-Orn-K(e-(γ-Glu)- | 1112 | 5251.8 |
| | CO—(CH₂)₁₆—CO₂H)AQ-Me4Pal-QFIE-αMeY-LIA-Aib- | | |
| | GPSSGEPPPSGSEE-NH₂ | | |
| 1107 | Y-Aib-QGTFTSD-4Pal-SQ-αMeL-LD-Orn-K((γ-Glu)₂-CO— | 1113 | 5136.8 |
| | (CH₂)₁₆—CO₂H)AQ-Me4Pal-AFIE-αMeY-LIA-Aib- | | |
| | GPSSGAPPPSGSEE-NH₂ | | |
| 1108 | Y-Aib-QGTFTSD-4Pal-SQ-αMeL-LD-Orn-K((2-[2-(2- | 1114 | 5210.8 |
| | Amino-ethoxy)-ethoxy]-acetyl)-(γ-Glu)-CO—(CH₂)₁₆- | | |
| | CO₂H)AQ-Me4Pal-AFIE-αMeY-LIE-Aib- | | |
| | GPSSGAPPPSGSEE-NH₂ | | |
| 1109 | Y-Aib-QGTFTSD-4Pal-SQ-αMeL-LD-Orn-K((2-[2-(2- | 1115 | 5267.9 |
| | Amino-ethoxy)-ethoxy]-acetyl)-(γ-Glu)-CO—(CH₂)₁₆- | | |
| | CO₂H)AQ-Me4Pal-QFIE-αMeY-LIE-Aib- | | |
| | GPSSGAPPPSGSEE-NH₂ | | |
| 1110 | Y-Aib-QGTFTSD-4Pal-SQ-αMeL-LD-Orn-K((2-[2-(2- | 1116 | 5152.8 |
| | Amino-ethoxy)-ethoxy]-acetyl)-(γ-Glu)-CO—(CH₂)₁₆- | | |
| | CO₂H)AQ-Me4Pal-AFIE-αMeY-LIA-Aib- | | |
| | GPSSGAPPPSGSEE-NH₂ | | |
| 1111 | Y-Aib-QGTFTSD-4Pal-SQ-αMeL-LD-Orn-K((2-[2-(2- | 1117 | 5209.8 |
| | Amino-ethoxy)-ethoxy]-acetyl)-(γ-Glu)-CO—(CH₂)₁₆- | | |
| | CO₂H)AQ-Me4Pal-QFIE-αMeY-LIA-Aib- | | |
| | GPSSGAPPPSGSEE-NH₂ | | |
| 1112 | Y-Aib-QGTFTSD-4Pal-SQ-αMeL-LD-Orn-K(e-(γ-Glu)- | 1118 | 5194.8 |
| | CO—(CH₂)₁₆—CO₂H)AQ-Me4Pal-AFIE-αMeY-LIE-Aib- | | |
| | GPSSGAPPPSGSEE-NH₂ | | |
| 1113 | Y-Aib-QGTFTSD-4Pal-SQ-αMeL-LD-Orn-K(e-(γ-Glu)- | 1119 | 5251.8 |
| | CO—(CH₂)₁₆—CO₂H)AQ-Me4Pal-QFIE-αMeY-LIE-Aib- | | |
| | GPSSGAPPPSGSEE-NH₂ | | |
| 1114 | Y-Aib-QGTFTSD-4Pal-SQ-αMeL-LD-Orn-K(e-(γ-Glu)- | 1120 | 5136.8 |
| | CO—(CH₂)₁₆—CO₂H)AQ-Me4Pal-AFIE-αMeY-LIA-Aib- | | |
| | GPSSGAPPPSGSEE-NH₂ | | |
| 1115 | Y-Aib-QGTFTSD-4Pal-SQ-αMeL-LD-Orn-K(e-(γ-Glu)- | 1121 | 5193.8 |
| | CO—(CH₂)₁₆—CO₂H)AQ-Me4Pal-QFIE-αMeY-LIA-Aib- | | |
| | GPSSGAPPPSGSEE-NH₂ | | |
| 1116 | Y-Aib-QGTFTSD-4Pal-SQ-αMeL-LDKK((2-[2-(2-Amino- | 1122 | 5094.8 |
| | ethoxy)-ethoxy]-acetyl)-(γ-Glu)-CO—(CH₂)₁₆—CO₂H)AQ- | | |
| | Me4Pal-AFIE-Me4Pal-LIE-Aib-GPSSGAPPPSGTE-NH₂ | | |
| 1117 | Y-Aib-QGTFTSD-4Pal-SQ-αMeL-LDKK((2-[2-(2-Amino- | 1123 | 5151.8 |
| | ethoxy)-ethoxy]-acetyl)-(γ-Glu)-CO—(CH₂)₁₆—CO₂H)AQ- | | |
| | Me4Pal-AFIE-Me4Pal-LIE-Aib-GPSSGAPPPSGTGE-NH₂ | | |
| 1118 | Y-Aib-QGTFTSD-4Pal-SQ-αMeL-LDKK((γ-Glu)₂-CO— | 1124 | 5078.7 |
| | (CH₂)₁₆—CO₂H)AQ-Me4Pal-AFIE-Me4Pal-LIE-Aib- | | |
| | GPSSGAPPPSGTE-NH₂ | | |
| 1119 | Y-Aib-QGTFTSD-4Pal-SQ-αMeL-LDKK((γ-Glu)₂-CO— | 1125 | 5078.7 |
| | (CH₂)₁₆—CO₂H)AQ-Me4Pal-AFIE-Me4Pal-LIE-Aib- | | |
| | GPSSGAPPPSGTGE-NH₂ | | |
| 1120 | Y-Aib-QGTFTSD-4Pal-SQ-αMeL-LDKK((γ-Glu)₂-CO— | 1126 | 5135.8 |
| | (CH₂)₁₆—CO₂H)AQ-Me4Pal-AFIE-Me4Pal-LIE-Aib- | | |
| | GPSSGAPPPSGE-NH₂ | | |
| 1121 | Y-Aib-QGTFTSD-4Pal-SQ-αMeL-LDKK((γ-Glu)₂-CO— | 1127 | 4977.6 |
| | (CH₂)₁₆—CO₂H)AQ-Me4Pal-AFIE-Me4Pal-LIE-Aib- | | |
| | GPSSGAPPPSGEE-NH₂ | | |
| 1122 | Y-Aib-QGTFTSD-4Pal-SQ-αMeL-LDKK((γ-Glu)₂-CO— | 1128 | 5106.7 |
| | (CH₂)₁₆—CO₂H)AQ-Me4Pal-AFIE-Me4Pal-LIE-Aib- | | |
| | GPSSGAPPPSGSEE-NH₂ | | |
| 1123 | Y-Aib-QGTFTSD-4Pal-SQ-αMeL-LDKK((γ-Glu)₂-CO— | 1129 | 5193.8 |
| | (CH₂)₁₆—CO₂H)AQ-Me4Pal-AFIE-Me4Pal-LIE-Aib- | | |
| | GPSSGEPPPSGE-NH₂ | | |
| 1124 | Y-Aib-QGTFTSD-4Pal-SQ-αMeL-LDKK((γ-Glu)₂-CO— | 1130 | 5035.6 |
| | (CH₂)₁₆—CO₂H)AQ-Me4Pal-AFIE-Me4Pal-LIE-Aib- | | |
| | GPSSGEPPPSGEEE-NH₂ | | |
| 1125 | Y-Aib-QGTFTSD-4Pal-SQ-αMeL-LDKK((γ-Glu)₂-CO— | 1131 | 5293.9 |
| | (CH₂)₁₆—CO₂H)AQ-Me4Pal-AFIE-Me4Pal-LIE-Aib- | | |
| | GPSSGEPPPSGSEE-NH₂ | | |
| 1126 | Y-Aib-QGTFTSD-4Pal-SQ-αMeL-LDKK((γ-Glu)₂-CO— | 1132 | 5251.8 |
| | (CH₂)₁₆—CO₂H)AQ-Me4Pal-AFIEYLIE-Aib- | | |
| | GPSSGAPPPSGTE-NH₂ | | |
| 1127 | Y-Aib-QGTFTSD-4Pal-SQ-αMeL-LDKK((γ-Glu)₂-CO— | 1133 | 5079.7 |
| | (CH₂)₁₆—CO₂H)AQ-Me4Pal-AFIEYLIE-Aib- | | |
| | GPSSGAPPPSGTGE-NH₂ | | |
| 1128 | Y-Aib-QGTFTSD-4Pal-SQ-αMeL-LD-Orn-K(e-(γ-Glu)- | 1134 | 5136.8 |
| | CO—(CH₂)₁₆—CO₂H)AQ-Me4Pal-QFIQ-αMeY-LIA-Aib- | | |
| | GPSSGEPPPSGGGE-NH₂ | | |
| 1129 | Y-Aib-QGTFTSD-4Pal-SQ-αMeL-LD-Orn-K(e-(γ-Glu)- | 1135 | 5206.8 |
| | CO—(CH₂)₁₆—CO₂H)AQ-Me4Pal-QFIQ-αMeY-LIE-Aib- | | |
| | GPSSGEPPPSGGGE-NH₂ | | |
| 1130 | Y-Aib-QGTFTSD-4Pal-SQ-αMeL-LD-Orn-K(e-(γ-Glu)- | 1136 | 5091.7 |
| | CO—(CH₂)₁₆—CO₂H)AQ-Me4Pal-AFIQ-αMeY-LIA-Aib- | | |
| | GPSSGEPPPSGGGE-NH₂ | | |
| 1131 | Y-Aib-QGTFTSD-4Pal-SQ-αMeL-LD-Orn-K(e-(γ-Glu)- | 1137 | 5149.8 |
| | CO—(CH₂)₁₆—CO₂H)AQ-Me4Pal-AFIQ-αMeY-LIE-Aib- | | |
| | GPSSGEPPPSGGGE-NH₂ | | |
| 1132 | Y-Aib-QGTFTSD-4Pal-αMeS-Q-αMeL-LD-Orn-K(e-(γ- | 1138 | 5104.8 |
| | Glu)-CO—(CH₂)₁₆—CO₂H)AQ-Me4Pal-QFIQ-αMeY-LIA- | | |
| | Aib-GPSSGAPPPSGGGE-NH₂ | | |
| 1133 | Y-Aib-QGTFTSD-4Pal-αMeS-Q-αMeL-LD-Orn-K(e-(γ- | 1139 | 5134.7 |
| | Glu)-CO—(CH₂)₁₆—CO₂H)AQ-Me4Pal-QFIQ-αMeY- | | |
| | LIAGGPSSGEPPPSGGGE-NH₂ | | |
| 1134 | NMeY-Aib-QGTFTSD-4Pal-αMeS-Q-αMeL-LD-Orn-K(e- | 1140 | 5176.8 |
| | (γ-Glu)-CO—(CH₂)₁₆—CO₂H)AQ-Me4Pal-QFIQ-αMeY-LIE- | | |
| | Aib-GPSSGAPPPSGGGE-NH₂ | | |
| 1135 | NMeY-Aib-QGTFTSD-4Pal-αMeS-I-αMeL-LD-Orn-K(e- | 1141 | 5161.9 |
| | (γ-Glu)-CO—(CH₂)₁₆—CO₂H)AQ-Me4Pal-QFIQ-αMeY-LIE- | | |
| | Aib-GPSSGAPPPSGGGE-NH₂ | | |
| 1136 | Y-Aib-QGTFTSD-4Pal-αMeS-I-αMeL-LD-Orn-K(e-(γ- | 1142 | 5147.8 |
| | Glu)-CO—(CH₂)₁₆—CO₂H)AQ-Me4Pal-QFIQ-αMeY-LIE- | | |
| | Aib-GPSSGAPPPSGGGE-NH₂ | | |
| 1137 | Y-Aib-QGTFTSD-4Pal-αMeS-Q-αMeL-LD-Orn-K(e-(γ- | 1143 | 5099.7 |
| | Glu)-CO—(CH₂)₁₆—CO₂H)AQIvaQFIQ-αMeY-LIE-Aib- | | |
| | GPSSGAPPPSGGGE-NH₂ | | |
| 1138 | Y-Aib-QGTFTSD-4Pal-αMeS-Q-αMeL-LD-Orn-K(e-(γ- | 1144 | 5162.8 |
| | Glu)-CO—(CH₂)₁₆—CO₂H)AQ-Me4Pal-QFIQ-αMeY-LLE- | | |
| | Aib-GPSSGAPPPSGGGE-NH₂ | | |
| 1139 | Y-Aib-QGTFTSD-4Pal-αMeS-Q-αMeL-LD-Orn-K(e-(γ- | 1145 | 5099.7 |
| | Glu)-CO—(CH₂)₁₆—CO₂H)AQIvaQFIQ-αMeY-LLE-Aib- | | |
| | GPSSGAPPPSGGGE-NH₂ | | |
| 1140 | Y-Aib-QGT-αMeF(2F)-TSD-4Pal-αMeS-I-αMeL-LD-Orn- | 1146 | 5055.7 |
| | K((2-[2-(2-Amino-ethoxy)-ethoxy]-acetyl)-(γ-Glu)-CO— | | |
| | (CH₂)₁₆—CO₂H)AQ-Me4Pal-EFIe-αMeY- | | |
| | LIEGGPSSGAPPPSGE-NH₂ | | |
| 1141 | Y-Aib-QGT-αMeF(2F)-TSD-4Pal-αMeS-I-αMeL-LD-Orn- | 1147 | 5113.7 |
| | K((2-[2-(2-Amino-ethoxy)-ethoxy]-acetyl)-(γ-Glu)-CO— | | |
| | (CH₂)₁₆—CO₂H)AQ-Me4Pal-EFIe-αMeY- | | |
| | LIEGGPSSGEPPPSGE-NH₂ | | |
| 1142 | Y-Aib-QGT-αMeF(2F)-TSD-4Pal-αMeS-I-αMeL-LD-Orn- | 1148 | 5069.7 |
| | K((2-[2-(2-Amino-ethoxy)-ethoxy]-acetyl)-(γ-Glu)-CO— | | |
| | (CH₂)₁₆—CO₂H)AQ-Me4Pal-EFIe-αMeY- | | |
| | LIEGGPSSGAPPPTGE-NH₂ | | |
| 1143 | Y-Aib-QGT-αMeF(2F)-TSD-4Pal-αMeS-I-αMeL-LD-Orn- | 1149 | 5127.8 |
| | K((2-[2-(2-Amino-ethoxy)-ethoxy]-acetyl)-(γ-Glu)-CO— | | |
| | (CH₂)₁₆—CO₂H)AQ-Me4Pal-EFIe-αMeY- | | |
| | LIEGGPSSGEPPPTGE-NH₂ | | |
| 1144 | Y-Aib-QGT-αMeF(2F)-TSD-4Pal-αMeS-I-αMeL-LD-Orn- | 1150 | 5025.7 |
| | K((2-[2-(2-Amino-ethoxy)-ethoxy]-acetyl)-(γ-Glu)-CO— | | |
| | (CH₂)₁₆—CO₂H)AQ-Me4Pal-EFIe-αMeY- | | |
| | LIEGGPSSGAPPPGGE-NH₂ | | |
| 1145 | Y-Aib-QGT-αMeF(2F)-TSD-4Pal-αMeS-I-αMeL-LD-Orn- | 1151 | 5083.7 |
| | K((2-[2-(2-Amino-ethoxy)-ethoxy]-acetyl)-(γ-Glu)-CO— | | |
| | (CH₂)₁₆—CO₂H)AQ-Me4Pal-EFIe-αMeY- | | |
| | LIEGGPSSGEPPPGGE-NH₂ | | |
| 1146 | Y-Aib-QGT-αMeF(2F)-TSD-4Pal-αMeS-I-αMeL-LD-Orn- | 1152 | 5127.8 |
| | K((2-[2-(2-Amino-ethoxy)-ethoxy]-acetyl)-(γ-Glu)-CO— | | |
| | (CH₂)₁₆—CO₂H)AQ-Me4Pal-EFIe-αMeY- | | |
| | LIEGGPSSGAPPPESE-NH₂ | | |
| 1147 | Y-Aib-QGT-αMeF(2F)-TSD-4Pal-αMeS-I-αMeL-LD-Orn- | 1153 | 5185.8 |
| | K((2-[2-(2-Amino-ethoxy)-ethoxy]-acetyl)-(γ-Glu)-CO— | | |
| | (CH₂)₁₆—CO₂H)AQ-Me4Pal-EFIe-αMeY- | | |
| | LIEGGPSSGEPPPESE-NH₂ | | |
| 1148 | Y-Aib-QGT-αMeF(2F)-TSD-4Pal-αMeS-I-αMeL-LD-Orn- | 1154 | 5097.7 |
| | K((2-[2-(2-Amino-ethoxy)-ethoxy]-acetyl)-(γ-Glu)-CO— | | |
| | (CH₂)₁₆—CO₂H)AQ-Me4Pal-EFIe-αMeY- | | |
| | LIEGGPSSGAPPPEGE-NH₂ | | |
| 1149 | Y-Aib-QGT-αMeF(2F)-TSD-4Pal-αMeS-I-αMeL-LD-Orn- | 1155 | 5155.8 |
| | K((2-[2-(2-Amino-ethoxy)-ethoxy]-acetyl)-(γ-Glu)-CO— | | |
| | (CH₂)₁₆—CO₂H)AQ-Me4Pal-EFIe-αMeY- | | |
| | LIEGGPSSGEPPPEGE-NH₂ | | |
| 1150 | Y-Aib-QGT-αMeF(2F)-TSD-4Pal-αMeS-I-αMeL-LD-Orn- | 1156 | 5039.7 |
| | K((γ-Glu)₂-CO—(CH₂)₁₆—CO₂H)AQ-Me4Pal-EFIe-αMeY- | | |
| | LIEGGPSSGAPPPSGE-NH₂ | | |
| 1151 | Y-Aib-QGT-αMeF(2F)-TSD-4Pal-αMeS-I-αMeL-LD-Orn- | 1157 | 5097.7 |
| | K((γ-Glu)₂-CO—(CH₂)₁₆—CO₂H)AQ-Me4Pal-EFIe-αMeY- | | |
| | LIEGGPSSGEPPPSGE-NH₂ | | |
| 1152 | Y-Aib-QGT-αMeF(2F)-TSD-4Pal-αMeS-I-αMeL-LD-Orn- | 1158 | 5055.7 |
| | K((2-[2-(2-Amino-ethoxy)-ethoxy]-acetyl)-(γ-Glu)-CO— | | |
| | (CH₂)₁₆—CO₂H)AQ-Me4Pal-EFIe-αMeY- | | |
| | LVEGGPSSGAPPPTGE-NH₂ | | |
| 1153 | Y-Aib-QGT-αMeF(2F)-TSD-4Pal-αMeS-I-αMeL-LD-Orn- | 1159 | 5113.7 |
| | K((2-[2-(2-Amino-ethoxy)-ethoxy]-acetyl)-(γ-Glu)-CO— | | |
| | (CH₂)₁₆—CO₂H)AQ-Me4Pal-EFIe-αMeY- | | |
| | LVEGGPSSGEPPPTGE-NH₂ | | |
| 1154 | Y-Aib-QGT-αMeF(2F)-TSD-4Pal-αMeS-I-αMeL-LD-Orn- | 1160 | 5011.6 |
| | K((2-[2-(2-Amino-ethoxy)-ethoxy]-acetyl)-(γ-Glu)-CO— | | |
| | (CH₂)₁₆—CO₂H)AQ-Me4Pal-EFIe-αMeY- | | |
| | LVEGGPSSGAPPPGGE-NH₂ | | |
| 1155 | Y-Aib-QGT-αMeF(2F)-TSD-4Pal-αMeS-I-αMeL-LD-Orn- | 1161 | 5069.7 |
| | K((2-[2-(2-Amino-ethoxy)-ethoxy]-acetyl)-(γ-Glu)-CO— | | |
| | (CH₂)₁₆—CO₂H)AQ-Me4Pal-EFIe-αMeY- | | |
| | LVEGGPSSGEPPPGGE-NH₂ | | |
| 1156 | Y-Aib-QGT-αMeF(2F)-TSD-4Pal-αMeS-I-αMeL-LD-Orn- | 1162 | 5113.7 |
| | K((2-[2-(2-Amino-ethoxy)-ethoxy]-acetyl)-(γ-Glu)-CO— | | |
| | (CH₂)₁₆—CO₂H)AQ-Me4Pal-EFIe-αMeY- | | |
| | LVEGGPSSGAPPPESE-NH₂ | | |
| 1157 | Y-Aib-QGT-αMeF(2F)-TSD-4Pal-αMeS-I-αMeL-LD-Orn- | 1163 | 5171.8 |
| | K((2-[2-(2-Amino-ethoxy)-ethoxy]-acetyl)-(γ-Glu)-CO— | | |
| | (CH₂)₁₆—CO₂H)AQ-Me4Pal-EFIe-αMeY- | | |
| | LVEGGPSSGEPPPESE-NH₂ | | |
| 1158 | Y-Aib-QGT-αMeF(2F)-TSD-4Pal-αMeS-I-αMeL-LD-Orn- | 1164 | 5083.7 |
| | K((2-[2-(2-Amino-ethoxy)-ethoxy]-acetyl)-(γ-Glu)-CO— | | |
| | (CH₂)₁₆—CO₂H)AQ-Me4Pal-EFIe-αMeY- | | |
| | LVEGGPSSGAPPPEGE-NH₂ | | |
| 1159 | Y-Aib-QGT-αMeF(2F)-TSD-4Pal-αMeS-I-αMeL-LD-Orn- | 1165 | 5141.7 |
| | K((2-[2-(2-Amino-ethoxy)-ethoxy]-acetyl)-(γ-Glu)-CO— | | |
| | (CH₂)₁₆—CO₂H)AQ-Me4Pal-EFIe-αMeY- | | |
| | LVEGGPSSGEPPPEGE-NH₂ | | |
| 1160 | Y-Aib-QGT-αMeF(2F)-TSD-4Pal-αMeS-I-αMeL-LD-Orn- | 1166 | 5025.6 |
| | K((γ-Glu)₂-CO—(CH₂)₁₆—CO₂H)AQ-Me4Pal-EFIe-αMeY- | | |
| | LVEGGPSSGAPPPSGE-NH₂ | | |
| 1161 | Y-Aib-QGT-αMeF(2F)-TSD-4Pal-αMeS-I-αMeL-LD-Orn- | 1167 | 5083.7 |
| | K((γ-Glu)₂-CO—(CH₂)₁₆—CO₂H)AQ-Me4Pal-EFIe-αMeY- | | |
| | LVEGGPSSGEPPPSGE-NH₂ | | |
| 1162 | Y-Aib-QGT-αMeF(2F)-TSD-4Pal-αMeS-I-αMeL-LD-Orn- | 1168 | 5112.7 |
| | K((γ-Glu)₂-CO—(CH₂)₁₆—CO₂H)AQ-Me4Pal-EFIe-αMeY- | | |
| | LVEGGPSSGAPPPSGSE-NH₂ | | |
| 1163 | Y-Aib-QGT-αMeF(2F)-TSD-4Pal-αMeS-I-αMeL-LD-Orn- | 1169 | 5170.7 |
| | K((γ-Glu)₂-CO—(CH₂)₁₆—CO₂H)AQ-Me4Pal-EFIe-αMeY- | | |
| | LVEGGPSSGEPPPSGSE-NH₂ | | |
| 1164 | Y-Aib-QGT-αMeF-TSD-4Pal-αMeS-I-αMeL-LD-Orn-K((2- | 1170 | 5037.7 |
| | [2-(2-Amino-ethoxy)-ethoxy]-acetyl)-(γ-Glu)-CO—(CH₂)₁₆- | | |
| | CO₂H)AQ-Me4Pal-EFIe-αMeY-LIEGGPSSGAPPPSGE- | | |
| | NH₂ | | |
| 1165 | Y-Aib-QGT-αMeF-TSD-4Pal-αMeS-I-αMeL-LD-Orn-K((2- | 1171 | 5095.7 |
| | [2-(2-Amino-ethoxy)-ethoxy]-acetyl)-(γ-Glu)-CO—(CH₂)₁₆- | | |
| | CO₂H)AQ-Me4Pal-EFIe-αMeY-LIEGGPSSGEPPPSGE- | | |
| | NH₂ | | |
| 1166 | Y-Aib-QGT-αMeF-TSD-4Pal-αMeS-I-αMeL-LD-Orn-K((2- | 1172 | 5124.8 |
| | [2-(2-Amino-ethoxy)-ethoxy]-acetyl)-(γ-Glu)-CO—(CH₂)₁₆- | | |
| | CO₂H)AQ-Me4Pal-EFIe-αMeY-LIEGGPSSGAPPPSGSE- | | |
| | NH₂ | | |
| 1167 | Y-Aib-QGT-αMeF-TSD-4Pal-αMeS-I-αMeL-LD-Orn-K((2- | 1173 | 5182.8 |
| | [2-(2-Amino-ethoxy)-ethoxy]-acetyl)-(γ-Glu)-CO—(CH₂)₁₆- | | |
| | CO₂H)AQ-Me4Pal-EFIe-αMeY-LIEGGPSSGEPPPSGSE- | | |
| | NH₂ | | |
| 1168 | Y-Aib-QGT-αMeF-TSD-4Pal-αMeS-I-αMeL-LD-Orn-K((2- | 1174 | 5151.8 |
| | [2-(2-Amino-ethoxy)-ethoxy]-acetyl)-(γ-Glu)-CO—(CH₂)₁₆- | | |
| | CO₂H)AQ-Me4Pal-EFIe-αMeY- | | |
| | LIEGGPSSGAPPPSGGGE-NH₂ | | |
| 1169 | Y-Aib-QGT-αMeF-TSD-4Pal-αMeS-I-αMeL-LD-Orn-K((2- | 1175 | 5209.4 |
| | [2-(2-Amino-ethoxy)-ethoxy]-acetyl)-(γ-Glu)-CO—(CH₂)₁₆- | | |
| | CO₂H)AQ-Me4Pal-EFIe-αMeY-LIEGGPSSGEPPPSGGGE- | | |
| | NH₂ | | |
| 1170 | Y-Aib-QGT-αMeF-TSD-4Pal-αMeS-I-αMeL-LD-Orn-K((γ- | 1176 | 5021.7 |
| | Glu)₂-CO—(CH₂)₁₆—CO₂H)AQ-Me4Pal-EFIe-αMeY- | | |
| | LIEGGPSSGAPPPSGE-NH₂ | | |
| 1171 | Y-Aib-QGT-αMeF-TSD-4Pal-αMeS-I-αMeL-LD-Orn-K((γ- | 1177 | 5079.7 |
| | Glu)₂-CO—(CH₂)₁₆—CO₂H)AQ-Me4Pal-EFIe-αMeY- | | |
| | LIEGGPSSGEPPPSGE-NH₂ | | |
| 1172 | Y-Aib-QGT-αMeF-TSD-4Pal-αMeS-I-αMeL-LD-Orn-K((γ- | 1178 | 5108.7 |
| | Glu)₂-CO—(CH₂)₁₆—CO₂H)AQ-Me4Pal-EFIe-αMeY- | | |
| | LIEGGPSSGAPPPSGSE-NH₂ | | |
| 1173 | Y-Aib-QGT-αMeF-TSD-4Pal-αMeS-I-αMeL-LD-Orn-K((γ- | 1179 | 5166.8 |
| | Glu)₂-CO—(CH₂)₁₆—CO₂H)AQ-Me4Pal-EFIe-αMeY- | | |
| | LIEGGPSSGEPPPSGSE-NH₂ | | |
| 1174 | Y-Aib-QGT-αMeF-TSD-4Pal-αMeS-I-αMeL-LD-Orn-K((γ- | 1180 | 5135.8 |
| | Glu)₂-CO—(CH₂)₁₆—CO₂H)AQ-Me4Pal-EFIe-αMeY- | | |
| | LIEGGPSSGAPPPSGGGE-NH₂ | | |
| 1175 | Y-Aib-QGT-αMeF-TSD-4Pal-αMeS-I-αMeL-LD-Orn-K((γ- | 1181 | 5193.8 |
| | Glu)₂-CO—(CH₂)₁₆—CO₂H)AQ-Me4Pal-EFIe-αMeY- | | |
| | LIEGGPSSGEPPPSGGGE-NH₂ | | |
| 1176 | Y-Aib-QGT-αMeF(2F)-TSD-4Pal-αMeS-I-αMeL-LD-Orn- | 1182 | 5184.8 |
| | K((2-[2-(2-Amino-ethoxy)-ethoxy]-acetyl)-(γ-Glu)₂-CO— | | |
| | (CH₂)₁₆—CO₂H)AQ-Me4Pal-EFIe-αMeY- | | |
| | LIEGGPSSGAPPPSGE-NH₂ | | |
| 1177 | Y-Aib-QGT-αMeF(2F)-TSD-4Pal-αMeS-I-αMeL-LD-Orn- | 1183 | 5242.8 |
| | K((2-[2-(2-Amino-ethoxy)-ethoxy]-acetyl)-(γ-Glu)₂-CO— | | |
| | (CH₂)₁₆—CO₂H)AQ-Me4Pal-EFIe-αMeY- | | |
| | LIEGGPSSGEPPPSGE-NH₂ | | |
| 1178 | Y-Aib-QGT-αMeF(2F)-TSD-4Pal-αMeS-I-αMeL-LD-Orn- | 1184 | 5271.9 |
| | K((2-[2-(2-Amino-ethoxy)-ethoxy]-acetyl)-(γ-Glu)₂-CO— | | |
| | (CH₂)₁₆—CO₂H)AQ-Me4Pal-EFIe-αMeY- | | |
| | LIEGGPSSGAPPPSGSE-NH₂ | | |
| 1179 | Y-Aib-QGT-αMeF(2F)-TSD-4Pal-αMeS-I-αMeL-LD-Orn- | 1185 | 5329.9 |
| | K((2-[2-(2-Amino-ethoxy)-ethoxy]-acetyl)-(γ-Glu)₂-CO— | | |
| | (CH₂)₁₆—CO₂H)AQ-Me4Pal-EFIe-αMeY- | | |
| | LIEGGPSSGEPPPSGSE-NH₂ | | |
| 1180 | Y-Aib-QGT-αMeF(2F)-TSD-4Pal-αMeS-I-αMeL-LD-Orn- | 1186 | 5298.9 |
| | K((2-[2-(2-Amino-ethoxy)-ethoxy]-acetyl)-(γ-Glu)₂-CO— | | |
| | (CH₂)₁₆—CO₂H)AQ-Me4Pal-EFIe-αMeY- | | |
| | LIEGGPSSGAPPPSGGGE-NH₂ | | |
| 1181 | Y-Aib-QGT-αMeF(2F)-TSD-4Pal-αMeS-I-αMeL-LD-Orn- | 1187 | 5356.9 |
| | K((2-[2-(2-Amino-ethoxy)-ethoxy]-acetyl)-(γ-Glu)₂-CO— | | |
| | (CH₂)₁₆—CO₂H)AQ-Me4Pal-EFIe-αMeY- | | |
| | LIEGGPSSGEPPPSGGGE-NH₂ | | |
| 1182 | Y-Aib-QGTFTSD-4Pal-αMeS-Q-αMeL-LD-Orn-K(e-(γ- | 1188 | 5163.8 |
| | Glu)-CO—(CH₂)₁₆—CO₂H)AQ-Me4Pal-QFIE-αMeY-LIA- | | |
| | Aib-GPSSGEPPPSGGGE-NH₂ | | |
| 1183 | Y-Aib-QGTFTSD-4Pal-αMeS-Q-αMeL-LD-Orn-K(e-(γ- | 1189 | 5220.8 |
| | Glu)-CO—(CH₂)₁₆—CO₂H)AQ-Me4Pal-QFIQ-αMeY-LIE- | | |
| | Aib-GPSSGEPPPSGGGE-NH₂ | | |
| 1184 | Y-Aib-QGTFTSD-4Pal-αMeS-Q-αMeL-LD-Orn-K(e-(γ- | 1190 | 5221.8 |
| | Glu)-CO—(CH₂)₁₆—CO₂H)AQ-Me4Pal-QFIE-αMeY-LIE-Aib- | | |
| | GPSSGEPPPSGGGE-NH₂ | | |
| 1185 | Y-Aib-QGTFTSD-4Pal-αMeS-Q-αMeL-LD-Orn-K(e-(γ- | 1191 | 5105.7 |
| | Glu)-CO—(CH₂)₁₆—CO₂H)AQ-Me4Pal-QFIE-αMeY-LIA- | | |
| | Aib-GPSSGAPPPSGGGE-NH₂ | | |
| 1186 | Y-Aib-QGTFTSD-4Pal-αMeS-Q-αMeL-LD-Orn-K(e-(γ- | 1192 | 5162.8 |
| | Glu)-CO—(CH₂)₁₆—CO₂H)AQ-Me4Pal-QFIQ-αMeY-LIE- | | |
| | Aib-GPSSGAPPPSGGGE-NH₂ | | |
| 1187 | Y-Aib-QGTFTSD-4Pal-αMeS-Q-αMeL-LD-Orn-K(e-(γ- | 1193 | 5163.8 |
| | Glu)-CO—(CH₂)₁₆—CO₂H)AQ-Me4Pal-QFIE-αMeY-LIE-Aib- | | |
| | GPSSGAPPPSGGGE-NH₂ | | |
| 1188 | Y-Aib-QGTFTSD-4Pal-αMeS-Q-αMeL-LD-Orn-K(e-(γ- | 1194 | 5192.8 |
| | Glu)-CO—(CH₂)₁₆—CO₂H)AQ-Me4Pal-QFIQ-αMeY- | | |
| | LIEGGPSSGEPPPSGGGE-NH₂ | | |
| 1189 | Y-Aib-QGT-αMeF(2F)-TSD-4Pal-αMeS-I-αMeL-LD-Orn- | 1195 | 5121.9 |
| | K((2-[2-(2-Amino-ethoxy)-ethoxy]-acetyl)-(γ-Glu)-CO— | | |
| | (CH₂)₁₆—CO₂H)AQ-Me4Pal-EFIe-αMeY-LIEGGPPS-Aib- | | |
| | Orn-PPP-Orn-GS-NH₂ | | |
| 1190 | Y-Aib-QGT-αMeF(2F)-TSD-4Pal-αMeS-I-αMeL-LD-Orn- | 1196 | 5193.9 |
| | K((2-[2-(2-Amino-ethoxy)-ethoxy]-acetyl)-(γ-Glu)-CO— | | |
| | (CH₂)₁₆—CO₂H)AQ-Me4Pal-EFIe-αMeY-LIEGGPPS-Aib- | | |
| | EPPPEGE-NH₂ | | |
| 1191 | Y-Aib-QGT-αMeF(2F)-TSD-4Pal-αMeS-I-αMeL-LD-Orn- | 1197 | 5165.8 |
| | K((2-[2-(2-Amino-ethoxy)-ethoxy]-acetyl)-(γ-Glu)-CO— | | |
| | (CH₂)₁₆—CO₂H)AQ-Me4Pal-EFIe-αMeY- | | |
| | LIEGGPPSGEPPPEGE-NH₂ | | |
| 1192 | Y-Aib-QGT-αMeF(2F)-TSD-4Pal-αMeS-I-αMeL-LD-Orn- | 1198 | 5183.8 |
| | K((2-[2-(2-Amino-ethoxy)-ethoxy]-acetyl)-(γ-Glu)-CO— | | |
| | (CH₂)₁₆—CO₂H)AQ-Me4Pal-EFIe-αMeY-LIEGGPSS-Aib- | | |
| | APPPEGE-NH₂ | | |
| 1193 | Y-Aib-QGT-αMeF(2F)-TSD-4Pal-αMeS-I-αMeL-LD-Orn- | 1199 | 5178.9 |
| | K((2-[2-(2-Amino-ethoxy)-ethoxy]-acetyl)-(γ-Glu)-CO— | | |
| | (CH₂)₁₆—CO₂H)AQ-Me4Pal-EFIe-αMeY-LIEGGPPS-Aib- | | |
| | EPPP-Orn-GE-NH₂ | | |
| 1194 | Y-Aib-QGT-αMeF(2F)-TSD-4Pal-αMeS-I-αMeL-LD-Orn- | 1200 | 5178.9 |
| | K((2-[2-(2-Amino-ethoxy)-ethoxy]-acetyl)-(γ-Glu)-CO— | | |
| | (CH₂)₁₆—CO₂H)AQ-Me4Pal-EFIe-αMeY-LIEGGPPS-Aib- | | |
| | Orn-PPPEGE-NH₂ | | |
| 1195 | Y-Aib-QGT-αMeF(2F)-TSD-4Pal-αMeS-I-αMeL-LD-Orn- | 1201 | 5163.9 |
| | K((2-[2-(2-Amino-ethoxy)-ethoxy]-acetyl)-(γ-Glu)-CO— | | |
| | (CH₂)₁₆—CO₂H)AQ-Me4Pal-EFIe-αMeY-LIEGGPPS-Aib- | | |
| | Orn-PPP-Orn-GE-NH₂ | | |
| 1196 | Y-Aib-QGT-αMeF(2F)-TSD-4Pal-αMeS-I-αMeL-LD-Orn- | 1202 | 5194.0 |
| | K((2-[2-(2-Amino-ethoxy)-ethoxy]-acetyl)-(γ-Glu)-CO— | | |
| | (CH₂)₁₆—CO₂H)AQ-Me4Pal-EFIe-αMeY-LIEGGPPS-Aib- | | |
| | Orn-PPP-Orn-SE-NH₂ | | |
| 1197 | Y-Aib-QGT-αMeF(2F)-TSD-4Pal-αMeS-I-αMeL-LD-Orn- | 1203 | 5278.0 |
| | K((2-[2-(2-Amino-ethoxy)-ethoxy]-acetyl)-(γ-Glu)-CO— | | |
| | (CH₂)₁₆—CO₂H)AQ-Me4Pal-EFIe-αMeY-LIEGGPPS-Aib- | | |
| | Orn-PPP-Orn-GGGE-NH₂ | | |
| 1198 | Y-Aib-QGT-αMeF(2F)-TSD-4Pal-αMeS-I-αMeL-LD-Orn- | 1204 | 5223.9 |
| | K((2-[2-(2-Amino-ethoxy)-ethoxy]-acetyl)-(γ-Glu)-CO— | | |
| | (CH₂)₁₆—CO₂H)AQ-Me4Pal-EFIe-αMeY-LIEGGPPS-Aib- | | |
| | Orn-PPPSGSE-NH₂ | | |
| 1199 | Y-Aib-QGT-αMeF(2F)-TSD-4Pal-αMeS-I-αMeL-LD-Orn- | 1205 | 5251.0 |
| | K((2-[2-(2-Amino-ethoxy)-ethoxy]-acetyl)-(γ-Glu)-CO— | | |
| | (CH₂)₁₆—CO₂H)AQ-Me4Pal-EFIe-αMeY-LIEGGPPS-Aib- | | |
| | Orn-PPPSGGGE-NH₂ | | |
| 1200 | Y-Aib-QGT-αMeF(2F)-TSD-4Pal-αMeS-I-αMeL-LD-Orn- | 1206 | 5238.9 |
| | K((2-[2-(2-Amino-ethoxy)-ethoxy]-acetyl)-(γ-Glu)-CO— | | |
| | (CH₂)₁₆—CO₂H)AQ-Me4Pal-EFIe-αMeY-LIEGGPPS-Aib- | | |
| | EPPPSGSE-NH₂ | | |
| 1201 | Y-Aib-QGT-αMeF(2F)-TSD-4Pal-αMeS-I-αMeL-LD-Orn- | 1207 | 5265.9 |
| | K((2-[2-(2-Amino-ethoxy)-ethoxy]-acetyl)-(γ-Glu)-CO— | | |
| | (CH₂)₁₆—CO₂H)AQ-Me4Pal-EFIe-αMeY-LIEGGPPS-Aib- | | |
| | EPPPSGGGE-NH₂ | | |
| 1202 | Y-Aib-QGT-αMeF(2F)-TSD-4Pal-αMeS-I-αMeL-LD-Orn- | 1208 | 5012.7 |
| | K((2-[2-(2-Amino-ethoxy)-ethoxy]-acetyl)-(γ-Glu)-CO— | | |
| | (CH₂)₁₆—CO₂H)AQ-Me4Pal-EFIq-αMeY- | | |
| | LIEGGPSSGAPPPSGS-NH₂ | | |
| 1203 | Y-Aib-QaT-αMeF(2F)-TSD-4Pal-αMeS-I-αMeL-LD-Orn- | 1209 | 4950.6 |
| | K((2-[2-(2-Amino-ethoxy)-ethoxy]-acetyl)-(γ-Glu)-CO— | | |
| | (CH₂)₁₆—CO₂H)AQ-Aib-EFIe-αMeY- | | |
| | LIEGGPSSGAPPPSGS-NH₂ | | |
| 1204 | Y-Aib-QaT-αMeF(2F)-TSD-4Pal-αMeS-I-αMeL-LD-Orn- | 1210 | 4936.6 |
| | K((2-[2-(2-Amino-ethoxy)-ethoxy]-acetyl)-(γ-Glu)-CO— | | |
| | (CH₂)₁₆—CO₂H)AQ-Aib-EFIe-αMeY- | | |
| | LVEGGPSSGAPPPSGS-NH₂ | | |
| 1205 | Y-Aib-QaT-αMeF(2F)-TSD-4Pal-SI-αMeL-LD-Orn-K((2- | 1211 | 4999.6 |
| | [2-(2-Amino-ethoxy)-ethoxy]-acetyl)-(γ-Glu)-CO—(CH₂)₁₆- | | |
| | CO₂H)AQ-Me4Pal-EFIe-αMeY-LVEGGPSSGAPPPSGS- | | |
| | NH₂ | | |
| 1206 | Y-Aib-QaT-αMeF(2F)-TSD-4Pal-SI-αMeL-LD-Orn-K((2- | 1212 | 5013.7 |
| | [2-(2-Amino-ethoxy)-ethoxy]-acetyl)-(γ-Glu)-CO—(CH₂)₁₆- | | |
| | CO₂H)AQ-Me4Pal-EFIe-αMeY-LIEGGPSSGAPPPSGS- | | |
| | NH₂ | | |
| 1207 | Y-Aib-QGT-αMeF(2F)-TSD-4Pal-αMeS-I-αMeL-LD-Orn- | 1213 | 5158.8 |
| | K((2-[2-(2-Amino-ethoxy)-ethoxy]-acetyl)₂-(γ-Glu)-CO— | | |
| | (CH₂)₁₆—CO₂H)AQ-Me4Pal-EFIe-αMeY- | | |
| | LIEGGPSSGAPPPSGS-NH₂ | | |
| 1208 | Y-Aib-QGT-αMeF(2F)-TSD-4Pal-αMeS-I-αMeL-LD-Orn- | 1214 | 5216.9 |
| | K((2-[2-(2-Amino-ethoxy)-ethoxy]-acetyl)₂-(γ-Glu)-CO— | | |
| | (CH₂)₁₆—CO₂H)AQ-Me4Pal-EFIe-αMeY- | | |
| | LIEGGPSSGEPPPSGS-NH₂ | | |
| 1209 | Y-Aib-QGT-αMeF(2F)-TSD-4Pal-SI-αMeL-LD-Orn- | 1215 | 5140.8 |
| | Orn((γ-Glu)₂-CO—(CH₂)₁₆—CO₂H))AQ-Me4Pal-Orn-FIe- | | |
| | αMeY-LIEGGPSSGEPPPETE-NH₂ | | |
| 1210 | Y-Aib-QGT-αMeF(2F)-TSD-4Pal-αMeS-I-αMeL-LD-Orn- | 1216 | 4985.6 |
| | Orn((2-[2-(2-Amino-ethoxy)-ethoxy]-acetyl)-(γ-Glu)-CO— | | |
| | (CH₂)₁₆—CO₂H)AQ-Me4Pal-EFIe-αMeY- | | |
| | LVEGGPSSGAPPPSGS-NH₂ | | |
| 1211 | Y-Aib-QGT-αMeF(2F)-TSD-4Pal-αMeS-I-αMeL-LD-Orn- | 1217 | 4999.6 |
| | Orn((2-[2-(2-Amino-ethoxy)-ethoxy]-acetyl)-(γ-Glu)-CO— | | |
| | (CH₂)₁₆—CO₂H)AQ-Me4Pal-EFIe-αMeY- | | |
| | LIEGGPSSGAPPPSGS-NH₂ | | |
| 1212 | Y-Aib-QGT-αMeF(2F)-TSD-4Pal-αMeS-I-αMeL-LD-Orn- | 1218 | 5128.7 |
| | Orn((2-[2-(2-Amino-ethoxy)-ethoxy]-acetyl)-(γ-Glu)-CO— | | |
| | (CH₂)₁₆—CO₂H)AQ-Me4Pal-EFIe-αMeY- | | |
| | LIEGGPSSGAPPPSGSE-NH₂ | | |
| 1213 | Y-Aib-QGT-αMeF(2F)-TSD-4Pal-αMeS-I-αMeL-LD-Orn- | 1219 | 5155.8 |
| | Orn((2-[2-(2-Amino-ethoxy)-ethoxy]-acetyl)-(γ-Glu)-CO— | | |
| | (CH₂)₁₆—CO₂H)AQ-Me4Pal-EFIe-αMeY- | | |
| | LIEGGPSSGAPPPSGGGE-NH₂ | | |
| 1214 | Y-Aib-QGT-αMeF(2F)-TSD-4Pal-αMeS-I-αMeL-LD-Orn- | 1220 | 5298.9 |
| | K((2-[2-(2-Amino-ethoxy)-ethoxy]-acetyl)-(γ-Glu)-CO— | | |
| | (CH₂)₁₆—CO₂H)AQ-Me4Pal-EFIe-αMeY- | | |
| | LIEGGPSSGAPPPSGGGEE-NH₂ | | |
| 1215 | Y-Aib-QGT-αMeF(2F)-TSD-4Pal-αMeS-I-αMeL-LD-Orn- | 1221 | 5428.0 |
| | K((2-[2-(2-Amino-ethoxy)-ethoxy]-acetyl)-(γ-Glu)-CO— | | |
| | (CH₂)₁₆—CO₂H)AQ-Me4Pal-EFIe-αMeY- | | |
| | LIEGGPSSGAPPPSGGGEEE-NH₂ | | |
| 1216 | Y-Aib-QGT-αMeF(2F)-TSD-4Pal-αMeS-I-αMeL-LD-Orn- | 1222 | 5341.0 |
| | K((2-[2-(2-Amino-ethoxy)-ethoxy]-acetyl)-(γ-Glu)-CO— | | |
| | (CH₂)₁₆—CO₂H)AQ-Me4Pal-EFIe-αMeY- | | |
| | LIEGGPSSGAPPPEGGGEE-NH₂ | | |
| 1217 | Y-Aib-QGT-αMeF(2F)-TSD-4Pal-αMeS-I-αMeL-LD-Orn- | 1223 | 5470.1 |
| | K((2-[2-(2-Amino-ethoxy)-ethoxy]-acetyl)-(γ-Glu)-CO— | | |
| | (CH₂)₁₆—CO₂H)AQ-Me4Pal-EFIe-αMeY- | | |
| | LIEGGPSSGAPPPEGGGEEE-NH₂ | | |
| 1218 | Y-Aib-QGT-αMeF(2F)-TSD-4Pal-αMeS-I-αMeL-LD-Orn- | 1224 | 5282.9 |
| | K((γ-Glu)₂-CO—(CH₂)₁₆—CO₂H)AQ-Me4Pal-EFIe-αMeY- | | |
| | LIEGGPSSGAPPPSGGGEE-NH₂ | | |
| 1219 | Y-Aib-QGT-αMeF(2F)-TSD-4Pal-αMeS-I-αMeL-LD-Orn- | 1225 | 5412.0 |
| | K((γ-Glu)₂-CO—(CH₂)₁₆—CO₂H)AQ-Me4Pal-EFIe-αMeY- | | |
| | LIEGGPSSGAPPPSGGGEEE-NH₂ | | |
| 1220 | Y-Aib-QGT-αMeF(2F)-TSD-4Pal-αMeS-I-αMeL-LD-Orn- | 1226 | 5324.9 |
| | K((γ-Glu)₂-CO—(CH₂)₁₆—CO₂H)AQ-Me4Pal-EFIe-αMeY- | | |
| | LIEGGPSSGAPPPEGGGEE-NH₂ | | |
| 1221 | Y-Aib-QGT-αMeF(2F)-TSD-4Pal-αMeS-I-αMeL-LD-Orn- | 1227 | 5454.0 |
| | K((γ-Glu)₂-CO—(CH₂)₁₆—CO₂H)AQ-Me4Pal-EFIe-αMeY- | | |
| | LIEGGPSSGAPPPEGGGEEE-NH₂ | | |
| 1222 | Y-Aib-QaT-αMeF(2F)-TSD-4Pal-αMeS-I-αMeL-LD-Orn- | 1228 | 5079.7 |
| | K((2-[2-(2-Amino-ethoxy)-ethoxy]-acetyl)-(γ-Glu)-CO— | | |
| | (CH₂)₁₆—CO₂H)AQ-Aib-EFIe-αMeY- | | |
| | LIEGGPSSGAPPPSGSE-NH₂ | | |
| 1223 | Y-Aib-QaT-αMeF(2F)-TSD-4Pal-αMeS-I-αMeL-LD-Orn- | 1229 | 5106.7 |
| | K((2-[2-(2-Amino-ethoxy)-ethoxy]-acetyl)-(γ-Glu)-CO— | | |
| | (CH₂)₁₆—CO₂H)AQ-Aib-EFIe-αMeY- | | |
| | LIEGGPSSGAPPPSGGGE-NH₂ | | |
| 1224 | Y-Aib-QaT-αMeF(2F)-TSD-4Pal-αMeS-I-αMeL-LD-Orn- | 1230 | 5063.7 |
| | K((γ-Glu)₂-CO—(CH₂)₁₆—CO₂H)AQ-Aib-EFIe-αMeY- | | |
| | LIEGGPSSGAPPPSGSE-NH₂ | | |
| 1225 | Y-Aib-QaT-αMeF(2F)-TSD-4Pal-αMeS-I-αMeL-LD-Orn- | 1231 | 5090.7 |
| | K((γ-Glu)₂-CO—(CH₂)₁₆—CO₂H)AQ-Aib-EFIe-αMeY- | | |
| | LIEGGPSSGAPPPSGGGE-NH₂ | | |
| 1226 | Y-Aib-QGT-αMeF(2F)-TSD-4Pal-αMeS-I-αMeL-LD-Orn- | 1232 | 5105.8 |
| | K((γ-Glu)₂-CO—(CH₂)₁₆—CO₂H)AQ-Me4Pal-EFIe-αMeY- | | |
| | LIEGGPPS-Aib -- Orn-PPP-Orn-GS-NH₂ | | |
| 1227 | Y-Aib-QGT-αMeF(2F)-TSD-4Pal-αMeS-I-αMeL-LD-Orn- | 1233 | 5147.9 |
| | K((γ-Glu)₂-CO—(CH₂)₁₆—CO₂H)AQ-Me4Pal-EFIe-αMeY- | | |
| | LIEGGPPS-Aib -- Orn-PPP-Orn-GE-NH₂ | | |
| 1228 | Y-Aib-QGT-αMeF(2F)-TSD-4Pal-αMeS-I-αMeL-LD-Orn- | 1234 | 5177.9 |
| | K((γ-Glu)₂-CO—(CH₂)₁₆—CO₂H)AQ-Me4Pal-EFIe-αMeY- | | |
| | LIEGGPPS-Aib -- Orn-PPP-Orn-SE-NH₂ | | |
| 1229 | Y-Aib-QGT-αMeF(2F)-TSD-4Pal-αMeS-I-αMeL-LD-Orn- | 1235 | 5262.0 |
| | K((γ-Glu)₂-CO—(CH₂)₁₆—CO₂H)AQ-Me4Pal-EFIe-αMeY- | | |
| | LIEGGPPS-Aib -- Orn-PPP-Orn-GG-NH₂ | | |
| 1230 | Y-Aib-QGT-αMeF(2F)-TSD-4Pal-SI-αMeL-LD-Orn-QAQ- | 1236 | 4600.1 |
| | Me4Pal -- Orn-FIe-αMeY-LIEGGPSSGEPPPETE-NH₂ | | |
| 1231 | Y-Aib-QGT-αMeF(2F)-TSD-4Pal-αMeS-I-αMeL-LD-Orn- | 1237 | 4428.9 |
| | QAQ-Me4Pal-EFIe-αMeY-LVEGGPSSGAPPPSGS-NH₂ | | |
| 1232 | Y-Aib-QGT-αMeF(2F)-TSD-4Pal-αMeS-I-αMeL-LD-Orn- | 1238 | 4442.9 |
| | QAQ-Me4Pal-EFIe-αMeY-LIEGGPSSGAPPPSGS-NH₂ | | |
| 1233 | Y-Aib-QGT-αMeF(2F)-TSD-4Pal-αMeS-I-αMeL-LD-Orn- | 1239 | 4572.0 |
| | QAQ-Me4Pal-EFIe-αMeY-LIEGGPSSGAPPPSGSE-NH₂ | | |
| 1234 | Y-Aib-QGT-αMeF(2F)-TSD-4Pal-αMeS-I-αMeL-LD-Orn- | 1240 | 4599.0 |
| | QAQ-Me4Pal-EFIe-αMeY-LIEGGPSSGAPPPSGGGE-NH₂ | | |
| 1235 | Y-Aib-QGTFTSD-4Pal-SQ-αMeL-LD-Orn-K(e-(γ-Glu)- | 1241 | 5295.9 |
| | CO—(CH₂)₁₆—CO₂H)AQ-Me4Pal-EFIe-αMeY- | | |
| | LIAGGPSSGAPPPSGSEEE-NH₂ | | |
| 1236 | Y-Aib-QGT-αMeF(2F)-TSD-4Pal-SI-αMeL-LD-Orn-K((2- | 1242 | 4749.3 |
| | [2-(2-Amino-ethoxy)-ethoxy]-acetyl)-(γ-Glu)-CO—(CH₂)₁₆- | | |
| | CO₂H)AA-Aib-AFIe-αMeY-LLEGGPSSGEPPPS-NH₂ | | |

[0861] Depictions of the structures of certain examples are provided below:

[chemical structure]

[chemical structure]

[chemical structure]

[chemical structure]

[chemical structure]

### In Vitro Function

### Functional Activity:

[0862] Functional activity is determined in GIP-R, GLP-1R, and GcgR-expressing HEK-293 clonal cell lines. Each receptor cell line is treated with peptide (20 point concentration response curves with 2.75-fold serial dilutions prepared with a Labcyte Echo Acoustic Liquid Handler) in DMEM (Gibco Cat #31053) supplemented with 1× GlutaMAX™ (L-alanyl-L-glutamine dipeptide, Gibco Cat #35050), 0.1% Casein (Sigma Cat #C4765), 1% HSA (Human Serum Albumin, Sigma Cat #A3782) 500 μM IBMX (3-isobutyl-1-methylxanthine) and 20 mM HEPES (4-(2-hydroxyethyl)-1-piperazineethanesulfonic acid) in a 20 μl assay volume.

[0863] After a 30-minute incubation at 37° C., the resulting increase in intracellular cAMP is quantitatively determined using the CisBio CAMP Dynamic 2 HTRF Assay Kit (62AM4PEJ). Briefly, cAMP levels within the cell are detected by adding the cAMP-d2 conjugate in cell lysis buffer followed by the antibody anti-cAMP-Eu³⁺-Cryptate, also in cell lysis buffer. The resulting competitive assay is incubated for at least 60 minutes at room temperature and then detected using a Pherastar Instrument (BMG Labtech) with excitation at 320 nm and emission at 665 nm and 620 nm. Raw data values (emission at 665 nm/620 nm*10,000) are inversely proportional to the amount of cAMP present and were converted to CAMP (nM) per well using a cAMP standard curve.

[0864] The amount of cAMP generated (nM) in each well is converted to a percent of the maximal response observed with either human GLP-1(7-36)NH₂, human Glucagon (Gcg), or human GIP(1-42)NH₂. A relative EC₅₀ value is derived by non-linear regression analysis using the percent maximal response vs. the concentration of peptide added, fitted to a four-parameter logistic equation.

[0865] The Geometric mean of relative EC₅₀ data for exemplary analogs and hGIP(1-42)NH₂, hGLP-1(7-36)NH₂ and hGcg are shown in Table 2 below.

TABLE 2
Functional cAMP Potency (Rel EC₅₀) for Exemplary Analogs
and Comparators in the Presence of 1% HSA.

| | cAMP Rel EC₅₀, nM | | |
|---|---|---|---|
| Example | hGcgR | hGIPR | hGLP-1R |
| hGcg | 2.2 | >300 | 160 |
| hGIP 1-42 amide | >9950 | 0.536 | >9950 |
| hGLP-1 7-36 amide | >99.5 | >99.5 | 0.346 |
| 1 | 1690 | 73.9 | 524 |
| 2 | 1630 | 75.5 | 631 |
| 3 | 1590 | 48.1 | 546 |
| 4 | 1580 | 62.3 | 869 |
| 5 | 2670 | 32.5 | 675 |
| 6 | 1380 | 46.6 | 446 |
| 7 | 1210 | 50.6 | 494 |
| 8 | 1560 | 39.4 | 603 |
| 9 | 1430 | 41.8 | 402 |
| 10 | 1640 | 43 | 375 |
| 11 | 1700 | 40.8 | 337 |
| 12 | 1490 | 30.2 | 216 |
| 13 | 1670 | 29.2 | 282 |
| 14 | 1420 | 34.7 | 232 |
| 15 | 1980 | 36.3 | 276 |
| 16 | 1660 | 35.9 | 281 |
| 17 | 2040 | 91.7 | 543 |
| 18 | 1210 | 59.6 | 561 |
| 19 | 1010 | 66.2 | 1310 |
| 20 | 587 | 42.3 | 326 |
| 21 | 1510 | 29.1 | 324 |
| 22 | 532 | 81 | 592 |
| 23 | 573 | 25.5 | 308 |
| 24 | 1390 | 102 | 447 |
| 25 | 939 | 19.8 | 520 |
| 26 | 980 | 35.4 | 623 |
| 27 | 1180 | 72.3 | 464 |
| 28 | 1550 | 63.8 | 686 |
| 29 | 1350 | 70.1 | 493 |
| 30 | 969 | 72.9 | 806 |
| 31 | 1750 | 63.6 | 737 |
| 32 | 1440 | 66.1 | 422 |
| 33 | 1310 | 70.7 | 436 |
| 34 | 855 | 44.2 | 242 |
| 35 | 1390 | 194 | 1130 |
| 36 | 1330 | 170 | 1360 |
| 37 | 1870 | 56.4 | 514 |
| 38 | 2770 | 102 | 884 |
| 39 | 1090 | 30.5 | 260 |
| 40 | 2750 | 76.7 | 138 |
| 41 | 2310 | 97.9 | 711 |
| 42 | 1520 | 32.3 | 700 |
| 43 | 850 | 29.6 | 539 |
| 44 | 1050 | 35.9 | 591 |
| 45 | 879 | 33.4 | 493 |
| 46 | 393 | 19.6 | 601 |
| 47 | 2140 | 154 | 1270 |
| 48 | 728 | 46.9 | 570 |
| 49 | 1310 | 44.9 | 151 |
| 50 | 1040 | 69.6 | 1110 |
| 51 | 856 | 98.4 | 1210 |
| 52 | 1740 | 111 | 1250 |
| 53 | 1780 | 113 | 1030 |
| 54 | 1940 | 168 | 1300 |
| 55 | 960 | 27.8 | 479 |
| 56 | 265 | 30.3 | 167 |
| 57 | 113 | 3.78 | 42.7 |
| 58 | 115 | 3.75 | 20.7 |
| 59 | 2160 | 166 | 1370 |
| 60 | 1210 | 33 | 409 |
| 61 | 1310 | 55.2 | 704 |
| 62 | 396 | 31.2 | 299 |
| 63 | 709 | 40.4 | 348 |
| 64 | 626 | 24.9 | 397 |
| 65 | 808 | 30.2 | 462 |
| 66 | 415 | 29.9 | 329 |
| 67 | 781 | 73.3 | 683 |
| 68 | 1160 | 85.1 | 612 |
| 69 | 387 | 25.6 | 279 |
| 70 | 717 | 27.4 | 620 |
| 71 | 2800 | 48.1 | 1010 |
| 72 | 1910 | 56.7 | 683 |
| 73 | 1530 | 57.9 | 810 |
| 74 | 709 | 15.9 | 627 |
| 75 | 1040 | 16.8 | 878 |
| 76 | 2240 | 45.5 | 436 |
| 77 | 2610 | 37.9 | 339 |
| 78 | 2640 | 78.4 | 560 |
| 79 | 903 | 14.3 | 437 |
| 80 | 1190 | 10.1 | 627 |
| 81 | 1580 | 50.2 | 430 |
| 82 | 1070 | 87.8 | 394 |
| 83 | 1270 | 91.8 | 653 |
| 84 | 2280 | 57.4 | 701 |
| 85 | 1270 | 22.1 | 387 |
| 86 | 1130 | 19.6 | 421 |
| 87 | 1110 | 12.8 | 290 |
| 88 | 915 | 24.7 | 363 |
| 89 | 916 | 19.3 | 458 |
| 90 | 990 | 24.9 | 371 |
| 91 | 1200 | 23.9 | 356 |
| 92 | 2540 | 62 | 735 |
| 93 | 1390 | 27.9 | 397 |
| 94 | 1220 | 21.4 | 480 |
| 95 | 1130 | 18.2 | 380 |
| 96 | 2150 | 49.3 | 836 |
| 97 | 1270 | 23.9 | 605 |
| 98 | 867 | 33.8 | 660 |
| 99 | 1130 | 29.5 | 588 |
| 100 | 2390 | 77.2 | 1190 |
| 101 | 2810 | 133 | 1090 |
| 102 | 2710 | 159 | 1060 |
| 103 | 2590 | 35.1 | 482 |
| 104 | 1260 | 97.5 | 698 |
| 105 | 2790 | 72.5 | 768 |
| 106 | 2000 | 91 | 977 |
| 107 | 1690 | 61.3 | 1110 |
| 108 | 1290 | 56.5 | 777 |
| 109 | 2760 | 22.3 | 671 |
| 110 | 627 | 19.8 | 821 |
| 111 | 1260 | 10.4 | 878 |
| 112 | 1810 | 29 | 892 |
| 113 | 2090 | 32.3 | 467 |
| 114 | 1120 | 19.6 | 1370 |
| 115 | 2210 | 73.9 | 1460 |
| 116 | 882 | 40.4 | 401 |
| 117 | 867 | 29.9 | 524 |
| 118 | 2460 | 63.4 | 1450 |
| 119 | 839 | 19.7 | 387 |
| 120 | 1540 | 33.4 | 664 |
| 121 | 442 | 24.6 | 348 |
| 122 | 548 | 32.6 | 468 |
| 123 | 1740 | 94.6 | 1500 |
| 124 | 567 | 54.7 | 801 |
| 125 | 901 | 67.8 | 1050 |
| 126 | 1120 | 40.3 | 838 |
| 127 | 1010 | 62.9 | 1000 |
| 128 | 1090 | 24.3 | 679 |
| 129 | 510 | 24.3 | 284 |
| 130 | 1080 | 60.5 | 865 |
| 131 | 976 | 91.8 | 984 |
| 132 | 632 | 25.9 | 823 |
| 133 | 642 | 23.1 | 1180 |
| 134 | 1200 | 38.3 | 549 |
| 135 | 557 | 23.4 | 472 |
| 136 | 960 | 32.9 | 625 |
| 137 | 905 | 23.7 | 447 |
| 138 | 1480 | 40.1 | 657 |
| 139 | 1250 | 64.8 | 710 |
| 140 | 2360 | 2.94 | 165 |
| 141 | 877 | 62.1 | 562 |
| 142 | 1230 | 14.1 | 391 |
| 143 | 1690 | 63.9 | 594 |
| 144 | 2600 | 46.2 | 990 |
| 145 | 693 | 108 | 1480 |
| 146 | 463 | 74.6 | 678 |
| 147 | 877 | 108 | 964 |
| 148 | 1330 | 74.2 | 870 |
| 149 | 1420 | 44.9 | 801 |
| 150 | 1920 | 50.6 | 463 |
| 151 | 1420 | 14.9 | 384 |
| 152 | 1090 | 23.2 | 491 |
| 153 | 1210 | 16.8 | 488 |
| 154 | 1040 | 29.7 | 569 |
| 155 | 1310 | 18.9 | 503 |
| 156 | 1520 | 25.8 | 695 |
| 157 | 838 | 22.2 | 496 |
| 158 | 325 | 24.7 | 184 |
| 159 | 475 | 49.7 | 588 |
| 160 | 479 | 44.4 | 482 |
| 161 | 902 | 87.3 | 963 |
| 162 | 558 | 37.5 | 786 |
| 163 | 790 | 52 | 762 |
| 164 | 411 | 59 | 962 |
| 165 | 1250 | 18.6 | 808 |
| 166 | 724 | 21 | 1500 |
| 167 | 938 | 24.7 | 1300 |
| 168 | 1270 | 31.9 | 281 |
| 169 | 439 | 21.5 | 216 |
| 170 | 1800 | 43.5 | 361 |
| 171 | 502 | 27.1 | 287 |
| 172 | 605 | 29.3 | 457 |
| 173 | 745 | 49.9 | 293 |
| 174 | 307 | 20.8 | 208 |
| 175 | 579 | 29.6 | 386 |
| 176 | 461 | 40.7 | 389 |
| 177 | 758 | 34.8 | 483 |
| 178 | 816 | 47.3 | 397 |
| 179 | 1440 | 21.3 | 904 |
| 180 | 1320 | 24 | 891 |
| 181 | 772 | 12.7 | 365 |
| 182 | 1480 | 9.95 | 398 |
| 183 | 504 | 13.7 | 295 |
| 184 | 1050 | 16.2 | 465 |
| 185 | 504 | 21.1 | 502 |
| 186 | 1280 | 18 | 690 |
| 187 | 2970 | 15.6 | 178 |
| 188 | 2920 | 43.8 | 436 |
| 189 | 853 | 22.2 | 423 |
| 190 | 331 | 59.4 | 172 |
| 191 | 344 | 47.4 | 230 |
| 192 | 560 | 9.86 | 719 |
| 193 | 1120 | 12.7 | 473 |
| 194 | 813 | 19.7 | 697 |
| 195 | 605 | 28.8 | 829 |
| 196 | 620 | 51.4 | 458 |
| 197 | 613 | 44.1 | 440 |
| 198 | 1300 | 38.8 | 761 |
| 199 | 1000 | 41.6 | 1060 |
| 200 | 360 | 13.7 | 395 |
| 201 | 969 | 14.3 | 679 |
| 202 | 697 | 11.7 | 376 |
| 203 | 1160 | 19 | 532 |
| 204 | 572 | 16.7 | 306 |
| 205 | 397 | 24.4 | 234 |
| 206 | 545 | 38.8 | 372 |
| 207 | 770 | 15.2 | 225 |
| 208 | 578 | 22 | 336 |
| 209 | 433 | 23.3 | 276 |
| 210 | 501 | 23.5 | 264 |
| 211 | 370 | 20.6 | 234 |
| 212 | 324 | 32.3 | 360 |
| 213 | 429 | 22.9 | 327 |
| 214 | 302 | 15.1 | 186 |
| 215 | 1510 | 87.3 | 162 |
| 216 | 895 | 12 | 90.6 |
| 217 | 1570 | 15 | 130 |
| 218 | 1480 | 15 | 152 |
| 219 | 1870 | 23.3 | 221 |
| 220 | 1990 | 87.1 | 189 |
| 221 | 1620 | 17.1 | 127 |
| 222 | 440 | 52.5 | 753 |
| 223 | 373 | 37.2 | 627 |
| 224 | 452 | 21.5 | 333 |
| 225 | 561 | 40.2 | 438 |
| 226 | 763 | 32.2 | 354 |
| 227 | 937 | 39.7 | 418 |
| 228 | 322 | 37.8 | 311 |
| 229 | 332 | 27.8 | 249 |
| 230 | 388 | 21.6 | 199 |
| 231 | 443 | 27.4 | 223 |
| 232 | 482 | 24.6 | 226 |
| 233 | 453 | 28.1 | 223 |
| 234 | 702 | 31.1 | 604 |
| 235 | 700 | 40.8 | 457 |
| 236 | 309 | 24.8 | 261 |
| 237 | 441 | 30.9 | 291 |
| 238 | 334 | 8.78 | 262 |
| 239 | 693 | 12 | 419 |
| 240 | 521 | 10.4 | 396 |
| 241 | 543 | 9.36 | 264 |
| 242 | 484 | 5.94 | 242 |
| 243 | 711 | 12.1 | 610 |
| 244 | 1230 | 18.8 | 645 |
| 245 | 1120 | 10.5 | 540 |
| 246 | 639 | 22 | 845 |
| 247 | 443 | 12.9 | 291 |
| 248 | 241 | 10.6 | 438 |
| 249 | 604 | 22.5 | 256 |
| 250 | 201 | 11.7 | 194 |
| 251 | 1500 | 22 | 301 |
| 252 | 528 | 24.8 | 504 |
| 253 | 963 | 26.6 | 355 |
| 254 | 767 | 21.4 | 265 |
| 255 | 883 | 21.9 | 272 |
| 256 | 625 | 17.4 | 235 |
| 257 | 1210 | 21 | 388 |
| 258 | 1280 | 23.3 | 492 |
| 259 | 317 | 18.4 | 220 |
| 260 | 162 | 12.4 | 160 |
| 261 | 520 | 38.4 | 383 |
| 262 | 720 | 40.4 | 400 |
| 263 | 893 | 25.7 | 257 |
| 264 | 1000 | 12.4 | 688 |
| 265 | 1890 | 29 | 381 |
| 266 | 923 | 17.3 | 583 |
| 267 | 1380 | 55.5 | 1020 |
| 268 | 1300 | 33.7 | 437 |
| 269 | 1100 | 21.9 | 428 |
| 270 | 1060 | 36.5 | 658 |
| 271 | 2680 | 15.7 | 887 |
| 272 | 1540 | 36.3 | 486 |
| 273 | 1770 | 21.8 | 516 |
| 274 | 1120 | 27.6 | 560 |
| 275 | 882 | 27.7 | 692 |
| 276 | 113 | 6.28 | 103 |
| 277 | 1690 | 13.3 | 639 |
| 278 | 274 | 7.69 | 241 |
| 279 | 427 | 11.6 | 367 |
| 280 | 1600 | 15.6 | 171 |
| 281 | 1370 | 25.8 | 295 |
| 282 | 1830 | 22.1 | 217 |
| 283 | 1470 | 47.2 | 233 |
| 284 | 1530 | 59.8 | 271 |
| 285 | 409 | 8.22 | 365 |
| 286 | 228 | 11.5 | 925 |
| 287 | 291 | 9.94 | 562 |
| 288 | 3580 | 59.1 | 616 |
| 289 | 1750 | 105 | 139 |
| 290 | 878 | 53.4 | 90 |
| 291 | 311 | 38 | 24.5 |
| 292 | 583 | 92.7 | 129 |
| 293 | 1740 | 9.63 | 295 |
| 294 | 518 | 54.1 | 554 |
| 295 | 605 | 61.1 | 232 |
| 296 | 517 | 21.8 | 171 |
| 297 | 2320 | 325 | 1130 |
| 298 | 1570 | 41.3 | 70.9 |
| 299 | 1700 | 40.2 | 380 |
| 300 | 976 | 12.9 | 98 |
| 301 | 1500 | 81.8 | 82.4 |
| 302 | 1370 | 91.8 | 73.6 |
| 303 | 9950 | 44.7 | 257 |
| 304 | 1720 | 48 | 172 |
| 305 | 1500 | 92.4 | 415 |
| 306 | 2820 | 95.3 | 126 |
| 307 | 1880 | 65.3 | 209 |
| 308 | 4950 | 237 | 477 |
| 309 | 3910 | 424 | 251 |
| 310 | 4000 | 15 | 177 |
| 311 | 2500 | 26.1 | 1080 |
| 312 | 4070 | 97.7 | 589 |
| 313 | 3290 | 86.4 | 135 |
| 314 | 1030 | 65.9 | 100 |
| 315 | 1560 | 85.1 | 140 |
| 316 | 2090 | 102 | 78.7 |
| 317 | 1500 | 62.8 | 234 |
| 318 | 1970 | 52.8 | 111 |
| 319 | 1650 | 60.1 | 119 |
| 320 | 1170 | 55.3 | 328 |
| 321 | 836 | 13 | 110 |
| 322 | 2620 | 89.3 | 135 |
| 323 | 1440 | 37.7 | 293 |
| 324 | 1410 | 20.7 | 1060 |
| 325 | 774 | 82.7 | 371 |
| 326 | 1500 | 83.7 | 172 |
| 327 | 1400 | 63.3 | 473 |
| 328 | 2040 | 91.1 | 462 |
| 329 | 842 | 42.6 | 204 |
| 330 | 398 | 7.33 | 91.8 |
| 331 | 339 | 47.5 | 207 |
| 332 | 3340 | 78.2 | 298 |
| 333 | 1410 | 36.3 | 182 |
| 334 | 2070 | 72.1 | 171 |
| 335 | 1410 | 46.7 | 150 |
| 336 | 1740 | 64.4 | 227 |
| 337 | 2950 | 99.1 | 272 |
| 338 | 659 | 10.9 | 172 |
| 339 | 1510 | 28.8 | 192 |
| 340 | 647 | 60.4 | 246 |
| 341 | 2930 | 49.6 | 395 |
| 342 | 2130 | 71.3 | 62 |
| 343 | 475 | 16.7 | 178 |
| 344 | 1440 | 70.7 | 523 |
| 345 | 3300 | 15.3 | 256 |
| 346 | 4310 | 28.3 | 514 |
| 347 | 3650 | 17.3 | 254 |
| 348 | 1250 | 36.4 | 136 |
| 349 | 2280 | 52.6 | 218 |
| 350 | 3760 | 33.6 | 360 |
| 351 | 2470 | 57.5 | 272 |
| 352 | 4020 | 34.1 | 407 |
| 353 | 3080 | 53.7 | 222 |
| 354 | 1440 | 23.8 | 175 |
| 355 | 3430 | 33.2 | 351 |
| 356 | 2680 | 19.2 | 206 |
| 357 | 1810 | 42.9 | 248 |
| 358 | 876 | 38.8 | 492 |
| 359 | 957 | 103 | 826 |
| 360 | 1470 | 78.3 | 989 |
| 361 | 987 | 46.3 | 376 |
| 362 | 1450 | 38.7 | 450 |
| 363 | 4080 | 91.8 | 217 |
| 364 | 3190 | 101 | 260 |
| 365 | 1490 | 14 | 75.2 |
| 366 | 1830 | 4.27 | 85.9 |
| 367 | 668 | 4.89 | 30.1 |
| 368 | 111 | 2.62 | 37.4 |
| 369 | 111 | 4.58 | 26.8 |
| 370 | 803 | 4.23 | 37.5 |
| 371 | 463 | 1.47 | 47.4 |
| 372 | 468 | 2.63 | 53.1 |
| 373 | 666 | 1.97 | 54.5 |
| 374 | 65.4 | 2.28 | 24.5 |
| 375 | 137 | 1.78 | 18 |
| 376 | 115 | 5.42 | 26 |
| 377 | 163 | 11.1 | 29.4 |
| 378 | 176 | 2.15 | 18.8 |
| 379 | 344 | 24 | 14.2 |
| 380 | 150 | 7.77 | 30.6 |
| 381 | 176 | 7.01 | 24.5 |
| 382 | 1050 | 17.7 | 61.5 |
| 383 | 530 | 32.3 | 79.1 |
| 384 | 1730 | 3.63 | 19.3 |
| 385 | 700 | 4.03 | 86.1 |
| 386 | 734 | 5.62 | 98.6 |
| 387 | 184 | 5.64 | 26.5 |
| 388 | 603 | 14.1 | 52.5 |
| 389 | 889 | 18.3 | 18.9 |
| 390 | 549 | 37.8 | 19.6 |
| 391 | 808 | 11.5 | 34.4 |
| 392 | 611 | 28.7 | 41.5 |
| 393 | 151 | 12.4 | 29.6 |
| 394 | 1090 | 7.22 | 33.2 |
| 395 | 1190 | 6.69 | 34.7 |
| 396 | 468 | 9.5 | 38.2 |
| 397 | 1110 | 10.1 | 34.9 |
| 398 | 375 | 12.4 | 42.2 |
| 399 | 560 | 19.6 | 42.8 |
| 400 | 265 | 3.86 | 29.1 |
| 401 | 111 | 1.71 | 12 |
| 402 | 1030 | 44.9 | 86.6 |
| 403 | 527 | 36.9 | 70 |
| 404 | 735 | 2.03 | 32.2 |
| 405 | 2530 | 32.1 | 285 |
| 406 | 254 | 10.5 | 27.8 |
| 407 | 485 | 11.7 | 37.2 |
| 408 | 472 | 15.3 | 37.9 |
| 409 | 1190 | 66.6 | 41.7 |
| 410 | 1950 | 49.3 | 84.4 |
| 411 | 1170 | 23.8 | 82.1 |
| 412 | 467 | 12.5 | 46 |
| 413 | 629 | 23.5 | 41.4 |
| 414 | 487 | 14.9 | 32.8 |
| 415 | 1090 | 28.9 | 52.6 |
| 416 | 348 | 27.6 | 40.8 |
| 417 | 386 | 4.46 | 67 |
| 418 | 627 | 6.02 | 36.6 |
| 419 | 1650 | 9.47 | 65.5 |
| 420 | 433 | 2.61 | 31.3 |
| 421 | 468 | 2.98 | 31.9 |
| 422 | 493 | 4.4 | 27.1 |
| 423 | 319 | 3.07 | 28.7 |
| 424 | 443 | 3.21 | 29.5 |
| 425 | 1150 | 46.9 | 20.3 |
| 426 | 740 | 29.8 | 16.6 |
| 427 | 1440 | 4.25 | 42.9 |
| 428 | 536 | 4.55 | 38.2 |
| 429 | 138 | 1.89 | 12.1 |
| 430 | 559 | 4.65 | 78.9 |
| 431 | 352 | 3.73 | 35.2 |
| 432 | 384 | 11.4 | 41.7 |
| 433 | 532 | 15.3 | 43.4 |
| 434 | 525 | 10.6 | 35 |
| 435 | 334 | 10.3 | 33.6 |
| 436 | 182 | 1.18 | 11.7 |
| 437 | 188 | 16.9 | 26.9 |
| 438 | 431 | 53.8 | 41.1 |
| 439 | 165 | 14.6 | 15.1 |
| 440 | 830 | 1.81 | 27.4 |
| 441 | 855 | 1.96 | 24.7 |
| 442 | 342 | 1.81 | 23.9 |
| 443 | 265 | 1.57 | 34.3 |
| 444 | 1280 | 1.74 | 54.6 |
| 445 | 448 | 2.41 | 23.2 |
| 446 | 516 | 3.01 | 24.5 |
| 447 | 1090 | 1.81 | 11.3 |
| 448 | 302 | 1.35 | 19.5 |
| 449 | 424 | 1.66 | 18.9 |
| 450 | 553 | 3.75 | 18.4 |
| 451 | 384 | 0.96 | 10.9 |
| 452 | 240 | 0.846 | 12.4 |
| 453 | 261 | 1.95 | 20.6 |
| 454 | 1280 | 4.31 | 135 |
| 455 | 1200 | 5.2 | 105 |
| 456 | 230 | 0.993 | 12.5 |
| 457 | 333 | 0.881 | 11.7 |
| 458 | 319 | 8.07 | 22.7 |
| 459 | 73.6 | 2.06 | 12.6 |
| 460 | 142 | 8.93 | 31.1 |
| 461 | 131 | 2.51 | 12 |
| 462 | 183 | 1.62 | 12.9 |
| 463 | 496 | 6.36 | 24.7 |
| 464 | 194 | 19.9 | 45.5 |
| 465 | 233 | 44.6 | 56.3 |
| 466 | 348 | 5.65 | 13.3 |
| 467 | 850 | 10.7 | 36.4 |
| 468 | 195 | 4.76 | 30.7 |
| 469 | 155 | 4.24 | 61.7 |
| 470 | 519 | 5.52 | 37.4 |
| 471 | 181 | 5.45 | 37.9 |
| 472 | 229 | 0.927 | 7.88 |
| 473 | 311 | 1.11 | 11.4 |
| 474 | 166 | 0.743 | 10.6 |
| 475 | 254 | 1.85 | 18.6 |
| 476 | 90.2 | 1.29 | 14.6 |
| 477 | 716 | 1.44 | 18.7 |
| 478 | 665 | 26 | 28.6 |
| 479 | 432 | 7.11 | 23.5 |
| 480 | 65.5 | 0.722 | 8.39 |
| 481 | 100 | 1.19 | 14.2 |
| 482 | 325 | 1.58 | 14.9 |
| 483 | 231 | 1.17 | 18.2 |
| 484 | 204 | 1.59 | 16 |
| 485 | 298 | 0.869 | 11.8 |
| 486 | 647 | 2.57 | 35 |
| 487 | 477 | 2.26 | 27.7 |
| 488 | 651 | 2.31 | 43.3 |
| 489 | 523 | 1.25 | 11.8 |
| 490 | 262 | 0.861 | 9.8 |
| 491 | 159 | 0.688 | 9.55 |
| 492 | 128 | 0.84 | 9.85 |
| 493 | 333 | 3.34 | 47 |
| 494 | 333 | 1.08 | 19.9 |
| 495 | 205 | 5.74 | 53.8 |
| 496 | 1500 | 60.8 | 1480 |
| 497 | 418 | 32.6 | 161 |
| 498 | 257 | 4.70 | 196 |
| 499 | 192 | 3.12 | 26.4 |
| 500 | 494 | 3.9 | 50.3 |
| 501 | 455 | 2.32 | 38 |
| 502 | 395 | 2.42 | 30.6 |
| 503 | 233 | 2.02 | 26.1 |
| 504 | 162 | 1.8 | 16.5 |
| 505 | 92 | 2.1 | 39 |
| 506 | 2330 | 28.7 | 224 |
| 507 | 209 | 1.12 | 21.3 |
| 508 | 255 | 0.856 | 17.5 |
| 509 | 617 | 5.01 | 69.2 |
| 510 | 564 | 6.4 | 74.2 |
| 511 | 594 | 6.55 | 108 |
| 512 | 891 | 9.2 | 112 |
| 513 | 1440 | 10.3 | 78.2 |
| 514 | 1150 | 10 | 82 |
| 515 | 1070 | 14.9 | 108 |
| 516 | 1410 | 13.6 | 111 |
| 517 | 337 | 9.12 | 50 |
| 518 | 265 | 7.1 | 51 |
| 519 | 356 | 10.8 | 66.5 |
| 520 | 407 | 9.09 | 60.6 |
| 521 | 275 | 0.967 | 24.8 |
| 522 | 441 | 1.95 | 35.5 |
| 523 | 234 | 0.869 | 27.1 |
| 524 | 464 | 1.46 | 32.7 |
| 525 | 460 | 2.07 | 20.2 |
| 526 | 530 | 2.12 | 22.9 |
| 527 | 580 | 2.6 | 26.8 |
| 528 | 474 | 1.55 | 24.3 |
| 529 | 398 | 1.39 | 24.5 |
| 530 | 1280 | 63.7 | 437 |
| 531 | 465 | 5.2 | 37.8 |
| 532 | 157 | 1.49 | 47.3 |
| 533 | 453 | 3.23 | 30 |
| 534 | 499 | 3.73 | 34.9 |
| 535 | 238 | 1.16 | 29.9 |
| 536 | 351 | 1.5 | 32.5 |
| 537 | 454 | 4.48 | 46.9 |
| 538 | 677 | 5.07 | 44.9 |
| 539 | 461 | 1.63 | 33.8 |
| 540 | 405 | 1.93 | 38.2 |
| 541 | 520 | 1.28 | 38.7 |
| 542 | 256 | 1.69 | 29.6 |
| 543 | 300 | 1.88 | 32 |
| 544 | 171 | 2.4 | 43 |
| 545 | 180 | 2.74 | 40.2 |
| 546 | 225 | 11.9 | 34.4 |
| 547 | 237 | 7.26 | 27.7 |
| 548 | 295 | 3.48 | 38 |
| 549 | 655 | 3.67 | 76.2 |
| 550 | 996 | 5.94 | 262 |
| 551 | 210 | 1.88 | 38.2 |
| 552 | 289 | 1.67 | 86.2 |
| 553 | 523 | 2.97 | 51 |
| 554 | 946 | 4.08 | 60.8 |
| 555 | 274 | 5.31 | 42 |
| 556 | 366 | 5.51 | 47.4 |
| 557 | 223 | 2.99 | 20.8 |
| 558 | 291 | 3.62 | 28 |
| 559 | 323 | 9.15 | 49.7 |
| 560 | 355 | 7.94 | 52 |
| 561 | 544 | 10.1 | 76.1 |
| 562 | 427 | 10.2 | 89.5 |
| 563 | 1010 | 11.8 | 98.7 |
| 564 | 667 | 10.8 | 101 |
| 565 | 1770 | 21.9 | 204 |
| 566 | 1780 | 30.1 | 252 |
| 567 | 521 | 13.4 | 102 |
| 568 | 477 | 13.2 | 116 |
| 569 | 697 | 12.4 | 84.4 |
| 570 | 648 | 13.6 | 95.1 |
| 571 | 243 | 4.23 | 42.7 |
| 572 | 330 | 3.13 | 30.4 |
| 573 | 388 | 3.15 | 31.6 |
| 574 | 435 | 20.5 | 37.2 |
| 575 | 484 | 16.2 | 37.1 |
| 576 | 646 | 8.12 | 56.8 |
| 577 | 937 | 10 | 81.8 |
| 578 | 781 | 3.73 | 54.7 |
| 579 | 679 | 3.79 | 67.3 |
| 580 | 922 | 6.29 | 55.3 |
| 581 | 1500 | 7.29 | 65.9 |
| 582 | 1060 | 10.8 | 35.5 |
| 583 | 1250 | 12.3 | 71 |
| 584 | 497 | 5.5 | 137 |
| 585 | 436 | 3.93 | 38.6 |
| 586 | 302 | 2.46 | 29.1 |
| 587 | 252 | 3.47 | 31.9 |
| 588 | 259 | 2.86 | 34.1 |
| 589 | 289 | 3.83 | 44.4 |
| 590 | 309 | 4.25 | 58.7 |
| 591 | 234 | 3 | 44.5 |
| 592 | 195 | 4.05 | 55.6 |
| 593 | 591 | 2.71 | 35.3 |
| 594 | 570 | 3.32 | 49.1 |
| 595 | 353 | 1.73 | 30.4 |
| 596 | 385 | 1.98 | 36.6 |
| 597 | 329 | 2.38 | 36.4 |
| 598 | 457 | 3.49 | 47.3 |
| 599 | 629 | 9.67 | 89.3 |
| 600 | 587 | 9.56 | 85.7 |
| 601 | 201 | 2.11 | 27.7 |
| 602 | 190 | 3.53 | 31.9 |
| 603 | 419 | 4.99 | 49.5 |
| 604 | 427 | 4.84 | 51 |
| 605 | 353 | 6.69 | 56.2 |
| 606 | 474 | 5.69 | 53.1 |
| 607 | 565 | 6.63 | 139 |
| 608 | 669 | 8.51 | 201 |
| 609 | 647 | 6.19 | 121 |
| 610 | 536 | 7.02 | 130 |
| 611 | 627 | 7.35 | 146 |
| 612 | 640 | 7.58 | 126 |
| 613 | 1410 | 0.791 | 81.6 |
| 614 | 724 | 0.597 | 33.2 |
| 615 | 697 | 0.95 | 82.9 |
| 616 | 734 | 0.467 | 28.9 |
| 617 | 547 | 0.643 | 67.4 |
| 618 | 691 | 4.63 | 88.9 |
| 619 | 819 | 6.78 | 94 |
| 620 | 665 | 5.96 | 90.7 |
| 621 | 901 | 7.31 | 111 |
| 622 | 641 | 1.19 | 52.3 |
| 623 | 832 | 1.48 | 62.2 |
| 624 | 808 | 1.17 | 63.4 |
| 625 | 657 | 1.81 | 72.1 |
| 626 | 546 | 1.75 | 60.8 |
| 627 | 813 | 1.47 | 75.1 |
| 628 | 651 | 1.87 | 79.8 |
| 629 | 898 | 2.37 | 110 |
| 630 | 872 | 2.96 | 74.5 |
| 631 | 1250 | 3.92 | 55 |
| 632 | 1600 | 5.48 | 88.2 |
| 633 | 1500 | 1.63 | 41.2 |
| 634 | 979 | 1.48 | 34.9 |
| 635 | 753 | 2.7 | 53.9 |
| 636 | 935 | 4.3 | 36.6 |
| 637 | 968 | 7.23 | 76.2 |
| 638 | 1090 | 2.39 | 36 |
| 639 | 750 | 2.04 | 27.9 |
| 640 | 730 | 0.591 | 27.8 |
| 641 | 451 | 0.832 | 68.3 |
| 642 | 519 | 0.791 | 67.1 |
| 643 | 1170 | 1.61 | 60.1 |
| 644 | 626 | 0.601 | 34.3 |
| 645 | 398 | 0.863 | 76.3 |
| 646 | 1260 | 1.09 | 90.5 |
| 647 | 1210 | 0.691 | 36.1 |
| 648 | 1170 | 1.4 | 86.5 |
| 649 | 669 | 0.76 | 62.9 |
| 650 | 574 | 3.1 | 31.4 |
| 651 | 639 | 6.3 | 53.9 |
| 652 | 764 | 1.92 | 26.8 |
| 653 | 542 | 1.38 | 25 |
| 654 | 886 | 10.9 | 116 |
| 655 | 883 | 8.86 | 76.9 |
| 656 | 662 | 7.13 | 119 |
| 657 | 226 | 6.43 | 74.5 |
| 658 | 376 | 12 | 106 |
| 659 | 735 | 5.75 | 81.5 |
| 660 | 455 | 4.64 | 76.9 |
| 661 | 160 | 4.62 | 50.9 |
| 662 | 561 | 4.69 | 84.5 |
| 663 | 226 | 10.2 | 79 |
| 664 | 179 | 1.18 | 27.7 |
| 665 | 285 | 2.1 | 32.8 |
| 666 | 224 | 1.39 | 32.3 |
| 667 | 215 | 1.46 | 33 |
| 668 | 203 | 1.69 | 27.1 |
| 669 | 173 | 1.41 | 27.3 |
| 670 | 489 | 1.9 | 104 |
| 671 | 152 | 0.657 | 17.6 |
| 672 | 162 | 1.53 | 49.4 |
| 673 | 114 | 0.419 | 10.8 |
| 674 | 168 | 2.54 | 17.3 |
| 675 | 207 | 1.16 | 25 |
| 676 | 208 | 1.07 | 24.4 |
| 677 | 190 | 1.03 | 20.8 |
| 678 | 245 | 0.929 | 22.1 |
| 679 | 188 | 1.02 | 21.6 |
| 680 | 256 | 1.04 | 28.6 |
| 681 | 104 | 0.395 | 14.2 |
| 682 | 127 | 0.415 | 14 |
| 683 | 137 | 0.492 | 14.3 |
| 684 | 143 | 0.436 | 14.2 |
| 685 | 160 | 0.497 | 18.7 |
| 686 | 169 | 0.542 | 19.1 |
| 687 | 157 | 0.595 | 21.3 |
| 688 | 182 | 0.61 | 19.5 |
| 689 | 182 | 0.951 | 25.1 |
| 690 | 142 | 0.522 | 17.4 |
| 691 | 308 | 1.17 | 28.9 |
| 692 | 380 | 1.25 | 25.2 |
| 693 | 304 | 1.1 | 18 |
| 694 | 206 | 0.787 | 25 |
| 695 | 164 | 0.772 | 19.5 |
| 696 | 173 | 0.53 | 19.1 |
| 697 | 130 | 0.607 | 18.2 |
| 698 | 124 | 0.824 | 20.6 |
| 699 | 144 | 0.566 | 25.3 |
| 700 | 132 | 0.397 | 20 |
| 701 | 226 | 0.979 | 24.9 |
| 702 | 196 | 1.25 | 28.4 |
| 703 | 201 | 0.961 | 27.1 |
| 704 | 239 | 1.2 | 33.9 |
| 705 | 234 | 1.15 | 33.7 |
| 706 | 240 | 0.913 | 23.7 |
| 707 | 199 | 1.05 | 30.6 |
| 708 | 124 | 0.562 | 22.1 |
| 709 | 107 | 0.63 | 23.4 |
| 710 | 126 | 0.589 | 28.7 |
| 711 | 197 | 0.786 | 35.2 |
| 712 | 171 | 0.584 | 30.8 |
| 713 | 180 | 0.879 | 37.7 |
| 714 | 197 | 0.754 | 33.2 |
| 715 | 126 | 0.51 | 19.7 |
| 716 | 100 | 0.557 | 24.1 |
| 717 | 130 | 0.561 | 21.4 |
| 718 | 144 | 0.531 | 23.2 |
| 719 | 181 | 0.882 | 23.2 |
| 720 | 239 | 1.02 | 28.3 |
| 721 | 183 | 1.19 | 27.1 |
| 722 | 170 | 0.953 | 27.2 |
| 723 | 179 | 1.02 | 26.5 |
| 724 | 209 | 1.06 | 26.4 |
| 725 | 244 | 1.39 | 29.1 |
| 726 | 226 | 1.22 | 33.3 |
| 727 | 287 | 1.09 | 24.1 |
| 728 | 298 | 1.45 | 26.7 |
| 729 | 276 | 1.43 | 27 |
| 730 | 216 | 1.29 | 33 |
| 731 | 291 | 1.27 | 27.4 |
| 732 | 327 | 1.26 | 27.2 |
| 733 | 207 | 1.15 | 34.3 |
| 734 | 230 | 1.3 | 38.1 |
| 735 | 236 | 1.32 | 40.7 |
| 736 | 245 | 1.23 | 46.3 |
| 737 | 122 | 0.498 | 22.3 |
| 738 | 162 | 0.64 | 28.2 |
| 739 | 155 | 0.507 | 27.1 |
| 740 | 181 | 0.629 | 29.7 |
| 741 | 200 | 0.817 | 32.4 |
| 742 | 203 | 0.857 | 33.3 |
| 743 | 133 | 0.432 | 21.2 |
| 744 | 111 | 0.488 | 22.1 |
| 745 | 266 | 1.36 | 29 |
| 746 | 255 | 1.44 | 38.6 |
| 747 | 169 | 0.651 | 20.3 |
| 748 | 156 | 0.865 | 22.9 |
| 749 | 28 | 1.47 | 33.9 |
| 750 | 205 | 1.34 | 39.1 |
| 751 | 267 | 1.27 | 32.3 |
| 752 | 228 | 1.74 | 44 |
| 753 | 351 | 1.86 | 38.2 |
| 754 | 381 | 1.94 | 33.3 |
| 755 | 274 | 1.39 | 23.9 |
| 756 | 372 | 1.61 | 28.2 |
| 757 | 310 | 1.81 | 30.8 |
| 758 | 388 | 1.59 | 31.3 |
| 759 | 223 | 1.05 | 34.8 |
| 760 | 239 | 1.29 | 43.6 |
| 761 | 162 | 0.635 | 26.1 |
| 762 | 119 | 0.692 | 27.6 |
| 763 | 222 | 1.16 | 42.5 |
| 764 | 146 | 0.649 | 38.8 |
| 765 | 111 | 44.6 | 26.1 |
| 766 | 65.7 | 14.1 | 32.5 |
| 767 | 207 | 1.51 | 56.8 |
| 768 | 2270 | 2.65 | 33.2 |
| 769 | 269 | 1.02 | 34 |
| 770 | 390 | 18.2 | 240 |
| 771 | 955 | 44.2 | 665 |
| 772 | 1880 | 21.6 | 206 |
| 773 | 2260 | 26.3 | 241 |
| 774 | 2330 | 32.8 | 404 |
| 775 | 724 | 25.8 | 202 |
| 776 | 908 | 25.7 | 191 |
| 777 | 1320 | 22.2 | 231 |
| 778 | 1370 | 30.5 | 245 |
| 779 | 1020 | 19.3 | 175 |
| 780 | 1250 | 22.1 | 211 |
| 781 | 808 | 13.1 | 244 |
| 782 | 1380 | 15.5 | 354 |
| 783 | 1300 | 16.9 | 497 |
| 784 | 711 | 11.8 | 284 |
| 785 | 1210 | 21.3 | 391 |
| 786 | 1490 | 25.9 | 536 |
| 787 | 2060 | 18.6 | 382 |
| 788 | 1420 | 20.7 | 528 |
| 789 | 1200 | 20.4 | 379 |
| 790 | 1200 | 34.1 | 858 |
| 791 | 456 | 143 | 980 |
| 792 | 376 | 108 | 619 |
| 793 | 1660 | 135 | 559 |
| 794 | 297 | 68.4 | 233 |
| 795 | 566 | 67.3 | 221 |
| 796 | 1000 | 17.5 | 125 |
| 797 | 963 | 16.7 | 102 |
| 798 | NA | NA | NA |
| 799 | 574 | 18.4 | 179 |
| 800 | 2500 | 40.2 | 164 |
| 801 | 1200 | 18.1 | 133 |
| 802 | 2520 | 16.9 | 153 |
| 803 | NA | NA | NA |
| 804 | 2310 | 17.6 | 161 |
| 805 | 1210 | 13 | 146 |
| 806 | 2760 | 15.1 | 128 |
| 807 | NA | NA | NA |
| 808 | 286 | 27.3 | 406 |
| 809 | 377 | 20.4 | 249 |
| 810 | 540 | 23.6 | 256 |
| 811 | 175 | 25.8 | 246 |
| 812 | 207 | 13.2 | 161 |
| 813 | 314 | 19.5 | 184 |
| 814 | 554 | 27.8 | 649 |
| 815 | 798 | 17.9 | 342 |
| 816 | 1100 | 15.9 | 310 |
| 817 | 690 | 12.3 | 151 |
| 818 | 516 | 13.8 | 91.7 |
| 819 | 393 | 9.79 | 134 |
| 820 | 1270 | 17.5 | 299 |
| 821 | 989 | 26.1 | 362 |
| 822 | 2100 | 18.1 | 322 |
| 823 | 1410 | 25.6 | 421 |
| 824 | 1110 | 28.9 | 343 |
| 825 | 1810 | 39.3 | 303 |
| 826 | 441 | 81.6 | 202 |
| 827 | 424 | 19.5 | 53.8 |
| 828 | 481 | 14.9 | 114 |
| 829 | 325 | 22.4 | 130 |
| 830 | 809 | 44.8 | 180 |
| 831 | 1450 | 38.2 | 237 |
| 832 | 1360 | 18.6 | 209 |
| 833 | 305 | 17.5 | 148 |
| 834 | 533 | 15.7 | 208 |
| 835 | 558 | 16.8 | 274 |
| 836 | 2100 | 26.7 | 103 |
| 837 | 2060 | 20.7 | 69.6 |
| 838 | 3070 | 23.2 | 72.2 |
| 839 | 1110 | 21.9 | 60.6 |
| 840 | 1810 | 12.5 | 61 |
| 841 | 2410 | 17.3 | 64.2 |
| 842 | 415 | 31.2 | 164 |
| 843 | 367 | 32.8 | 135 |
| 844 | 583 | 43.3 | 151 |
| 845 | 203 | 23.3 | 89.1 |
| 846 | 599 | 19.5 | 93.1 |
| 847 | 532 | 22.2 | 105 |
| 848 | 615 | 20.2 | 313 |
| 849 | 1160 | 36.6 | 111 |
| 850 | 3660 | 27 | 57.8 |
| 851 | 558 | 24.4 | 428 |
| 852 | 1230 | 45.6 | 182 |
| 853 | 4500 | 32.4 | 102 |
| 854 | 1280 | 18.7 | 570 |
| 855 | 1030 | 46.1 | 207 |
| 856 | 772 | 20.4 | 200 |
| 857 | 1050 | 36.1 | 87.3 |
| 858 | 678 | 13.1 | 258 |
| 859 | 2250 | 32.3 | 543 |
| 860 | 565 | 19.2 | 414 |
| 861 | 1350 | 18.3 | 322 |
| 862 | 1110 | 12.4 | 201 |
| 863 | 334 | 12.2 | 183 |
| 864 | 1480 | 13.2 | 110 |
| 865 | 248 | 10.8 | 351 |
| 866 | 669 | 23.8 | 483 |
| 867 | 242 | 16.2 | 474 |
| 868 | 622 | 17.7 | 822 |
| 869 | 571 | 14.1 | 114 |
| 870 | 736 | 7.29 | 71.2 |
| 871 | 2060 | 35.4 | 230 |
| 872 | 1890 | 30.1 | 287 |
| 873 | 506 | 44.2 | 138 |
| 874 | 603 | 36.2 | 201 |
| 875 | 689 | 13.8 | 78.6 |
| 876 | 940 | 7.94 | 70 |
| 877 | 1090 | 22.7 | 112 |
| 878 | 1130 | 16.7 | 137 |
| 879 | 329 | 20.1 | 591 |
| 880 | 562 | 76.2 | 943 |
| 881 | 507 | 30.1 | 321 |
| 882 | 559 | 26.6 | 361 |
| 883 | 578 | 9.41 | 120 |
| 884 | 613 | 23.5 | 298 |
| 885 | 574 | 19.7 | 326 |
| 886 | 540 | 26.5 | 271 |
| 887 | 525 | 37.1 | 403 |
| 888 | 567 | 30.8 | 238 |
| 889 | 688 | 21.6 | 371 |
| 890 | 559 | 14.2 | 290 |
| 891 | 581 | 16 | 330 |
| 892 | 529 | 21.5 | 405 |
| 893 | 508 | 21.4 | 305 |
| 894 | 2330 | 30.9 | 711 |
| 895 | 1250 | 34 | 599 |
| 896 | 1110 | 16.8 | 535 |
| 897 | 658 | 25.9 | 557 |
| 898 | 770 | 25.5 | 584 |
| 899 | 814 | 15.6 | 592 |
| 900 | 885 | 17 | 666 |
| 901 | 1150 | 34 | 193 |
| 902 | 1360 | 28.5 | 232 |
| 903 | 1630 | 31.2 | 387 |
| 904 | 1330 | 15 | 198 |
| 905 | 1390 | 10.4 | 215 |
| 906 | 1170 | 15.4 | 236 |
| 907 | 1210 | 8.86 | 123 |
| 908 | 980 | 26.7 | 174 |
| 909 | 1740 | 20.2 | 243 |
| 910 | 2640 | 25.7 | 239 |
| 911 | 2390 | 26.6 | 255 |
| 912 | 955 | 6.15 | 59.6 |
| 913 | 1140 | 5.62 | 258 |
| 914 | 983 | 5.94 | 91.7 |
| 915 | 174 | 15.3 | 226 |
| 916 | 158 | 4.78 | 166 |
| 917 | 424 | 6.2 | 195 |
| 918 | 590 | 18 | 484 |
| 919 | 467 | 25.8 | 454 |
| 920 | 1090 | 9.05 | 322 |
| 921 | 2130 | 12.4 | 261 |
| 922 | 1170 | 6.39 | 357 |
| 923 | 1840 | 18.5 | 870 |
| 924 | 910 | 15.7 | 402 |
| 925 | 2500 | 23 | 708 |
| 926 | 1380 | 13.5 | 600 |
| 927 | 1210 | 22.2 | 584 |
| 928 | 1090 | 15.1 | 604 |
| 929 | 2690 | 22.6 | 593 |
| 930 | 1700 | 19.9 | 824 |
| 931 | 2300 | 20.8 | 878 |
| 932 | 513 | 25 | 249 |
| 933 | 1530 | 35.1 | 557 |
| 934 | 1380 | 28.1 | 175 |
| 935 | 659 | 16.9 | 172 |
| 936 | 899 | 18.2 | 244 |
| 937 | 1160 | 19.7 | 261 |
| 938 | 2830 | 21.5 | 263 |
| 939 | 423 | 14.1 | 287 |
| 940 | 429 | 13.7 | 498 |
| 941 | 1430 | 22.1 | 113 |
| 942 | 1560 | 28.3 | 490 |
| 943 | 960 | 23.1 | 382 |
| 944 | 1840 | 37.2 | 985 |
| 945 | 2420 | 42.5 | 555 |
| 946 | 1950 | 57.4 | 576 |
| 947 | 727 | 16.6 | 150 |
| 948 | 537 | 22.9 | 304 |
| 949 | 317 | 26 | 721 |
| 950 | 327 | 18.1 | 328 |
| 951 | 657 | 18.2 | 382 |
| 952 | 266 | 16.6 | 439 |
| 953 | 275 | 10.9 | 347 |
| 954 | 450 | 35.3 | 357 |
| 955 | 366 | 42.3 | 1380 |
| 956 | 406 | 32.1 | 643 |
| 957 | 947 | 25 | 747 |
| 958 | 340 | 27.1 | 850 |
| 959 | 316 | 24.5 | 503 |
| 960 | 813 | 14.1 | 161 |
| 961 | 342 | 13.6 | 216 |
| 962 | 485 | 9.71 | 132 |
| 963 | 900 | 25.1 | 215 |
| 964 | 324 | 21.4 | 267 |
| 965 | 430 | 23.2 | 194 |
| 966 | 581 | 35.9 | 257 |
| 967 | 508 | 39.5 | 345 |
| 968 | 625 | 11.7 | 103 |
| 969 | 660 | 12.6 | 113 |
| 970 | 809 | 20.1 | 186 |
| 971 | 1340 | 30.2 | 294 |
| 972 | 660 | 30.4 | 327 |
| 973 | 2270 | 60.1 | 1140 |
| 974 | 870 | 80.9 | 283 |
| 975 | 374 | 30.1 | 1810 |
| 976 | 848 | 82.7 | 2860 |
| 977 | 839 | 23 | 159 |
| 978 | 824 | 33.9 | 174 |
| 979 | 359 | 19.2 | 257 |
| 980 | 239 | 15.4 | 290 |
| 981 | 477 | 21.1 | 330 |
| 982 | 307 | 19.4 | 310 |
| 983 | 576 | 19.4 | 207 |
| 984 | 409 | 23.5 | 160 |
| 985 | 374 | 24 | 217 |
| 986 | 702 | 31.3 | 380 |
| 987 | 267 | 11.7 | 515 |
| 988 | 320 | 11.8 | 743 |
| 989 | 247 | 8 | 402 |
| 990 | 276 | 9.87 | 557 |
| 991 | 405 | 14.8 | 315 |
| 992 | 863 | 12.5 | 643 |
| 993 | 1860 | 14.5 | 1210 |
| 994 | 1050 | 30.8 | 395 |
| 995 | 295 | 6.12 | 1660 |
| 996 | 1160 | 11.2 | 4810 |
| 997 | 527 | 27.8 | 1880 |
| 998 | 794 | 6.78 | 1470 |
| 999 | 2130 | 10.4 | 3020 |
| 1000 | 501 | 15.5 | 279 |
| 1001 | 1170 | 20 | 295 |
| 1002 | 197 | 11.6 | 1290 |
| 1003 | 371 | 15.9 | 1950 |
| 1004 | 237 | 35.4 | 973 |
| 1005 | 1670 | 14.5 | 171 |
| 1006 | 315 | 11.8 | 574 |
| 1007 | 636 | 12 | 95.1 |
| 1008 | 1010 | 15.2 | 126 |
| 1009 | 268 | 9.72 | 174 |
| 1010 | 214 | 15.1 | 218 |
| 1011 | 459 | 13.5 | 148 |
| 1012 | 533 | 15.9 | 223 |
| 1013 | 285 | 22.6 | 137 |
| 1014 | 277 | 5.62 | 86.4 |
| 1015 | 357 | 9.08 | 92.4 |
| 1016 | 626 | 30.6 | 156 |
| 1017 | 649 | 28.3 | 118 |
| 1018 | 568 | 14.1 | 163 |
| 1019 | 579 | 21.3 | 161 |
| 1020 | 478 | 27.3 | 146 |
| 1021 | 588 | 29 | 174 |
| 1022 | 586 | 27.9 | 203 |
| 1023 | 856 | 26 | 230 |
| 1024 | 760 | 32.5 | 330 |
| 1025 | 625 | 31.5 | 352 |
| 1026 | 2080 | 61.3 | 299 |
| 1027 | 1470 | 58.1 | 252 |
| 1028 | 3910 | 157 | 986 |
| 1029 | 511 | 22.3 | 170 |
| 1030 | 1830 | 21 | 385 |
| 1031 | 1200 | 17.3 | 152 |
| 1032 | 900 | 21.9 | 148 |
| 1033 | 2170 | 23.4 | 221 |
| 1034 | 1890 | 23 | 317 |
| 1035 | 1380 | 16 | 167 |
| 1036 | 353 | 13 | 1080 |
| 1037 | 291 | 13.7 | 625 |
| 1038 | 1300 | 29.8 | 349 |
| 1039 | 2020 | 26.8 | 413 |
| 1040 | 2020 | 20.8 | 322 |
| 1041 | 1720 | 75.7 | 316 |
| 1042 | 1890 | 84.8 | 642 |
| 1043 | 2240 | 44.9 | 268 |
| 1044 | 2410 | 88.7 | 1110 |
| 1045 | 1540 | 107 | 276 |
| 1046 | 1680 | 85 | 528 |
| 1047 | 1510 | 60.8 | 1960 |
| 1048 | 1930 | 108 | 1900 |
| 1049 | 1280 | 56.2 | 780 |
| 1050 | 2040 | 68.5 | 1240 |
| 1051 | 1800 | 32.6 | NA |
| 1052 | 1980 | 38 | NA |
| 1053 | 3470 | 19.3 | NA |
| 1054 | 1630 | 79.4 | NA |
| 1055 | 450 | 78.9 | NA |
| 1056 | 1650 | 29.6 | NA |
| 1057 | 2780 | 25.9 | NA |
| 1058 | 1450 | 45.6 | NA |
| 1059 | 748 | 48.9 | NA |
| 1060 | 4900 | 44.7 | NA |
| 1061 | 2910 | 55.6 | NA |
| 1062 | 2380 | 67.5 | NA |
| 1063 | 2290 | 26.6 | 626 |
| 1064 | 1940 | 62.5 | 912 |
| 1065 | 3080 | 39.1 | 2290 |
| 1066 | 4260 | 69.9 | 1850 |
| 1067 | 1860 | 86.4 | 2610 |
| 1068 | 295 | 20.2 | 1330 |
| 1069 | 2160 | 39.5 | 1290 |
| 1070 | 1940 | 27.3 | 321 |
| 1071 | 2990 | 40.2 | 425 |
| 1072 | 914 | 9.94 | 95.1 |
| 1073 | 1490 | 15.7 | 114 |
| 1074 | 1990 | 8.49 | 101 |
| 1075 | 3020 | 9.88 | 109 |
| 1076 | 1650 | 20.2 | 187 |
| 1077 | 3160 | 27.8 | 408 |
| 1078 | 1680 | 38.6 | 264 |
| 1079 | 4090 | 18.9 | 175 |
| 1080 | 2820 | 18.2 | 281 |
| 1081 | 2130 | 8.44 | 151 |
| 1082 | 1530 | 12.3 | 677 |
| 1083 | 1030 | 20.5 | 547 |
| 1084 | 1390 | 17.2 | 761 |
| 1085 | 1370 | 9.84 | 188 |
| 1086 | 3140 | 21.2 | 496 |
| 1087 | 2460 | 23.3 | 439 |
| 1088 | 1710 | 15.6 | 367 |
| 1089 | 2580 | 34.6 | 449 |
| 1090 | 2010 | 27.3 | 619 |
| 1091 | 550 | 5.79 | 145 |
| 1092 | 506 | 7.83 | 230 |
| 1093 | 958 | 26.8 | 141 |
| 1094 | 831 | 5.86 | 64.4 |
| 1095 | 337 | 8.73 | 159 |
| 1096 | 397 | 11.6 | 194 |
| 1097 | 752 | 27.3 | 141 |
| 1098 | 994 | 31.2 | 184 |
| 1099 | 472 | 8.64 | 75.8 |
| 1100 | 577 | 9.04 | 77.2 |
| 1101 | 827 | 6.31 | 246 |
| 1102 | 516 | 5.12 | 295 |
| 1103 | 1350 | 19.5 | 183 |
| 1104 | 1470 | 13.9 | 272 |
| 1105 | 1260 | 5.59 | 92.5 |
| 1106 | 1030 | 4.23 | 119 |
| 1107 | 864 | 5.29 | 59 |
| 1108 | 468 | 5.22 | 76.2 |
| 1109 | 510 | 20.2 | 102 |
| 1110 | 449 | 5.4 | 52 |
| 1111 | 299 | 3.66 | 51.3 |
| 1112 | 588 | 8.02 | 68.3 |
| 1113 | 343 | 3.47 | 88.2 |
| 1114 | 514 | 2.34 | 39 |
| 1115 | 420 | 1.28 | 60.4 |
| 1116 | 364 | 10.8 | 198 |
| 1117 | 355 | 8.31 | 237 |
| 1118 | 802 | 5.45 | 183 |
| 1119 | 237 | 3.95 | 152 |
| 1120 | 291 | 9.21 | 171 |
| 1121 | 566 | 4.55 | 165 |
| 1122 | 474 | 4.54 | 177 |
| 1123 | 441 | 3.89 | 191 |
| 1124 | 400 | 12 | 304 |
| 1125 | 264 | 3.95 | 243 |
| 1126 | 452 | 13.5 | 208 |
| 1127 | 425 | 7.72 | 234 |
| 1128 | 869 | 3.18 | 52.8 |
| 1129 | 796 | 4.16 | 56.6 |
| 1130 | 1240 | 3.73 | 44.5 |
| 1131 | 1140 | 5.47 | 63.7 |
| 1132 | 184 | 1.89 | 38.8 |
| 1133 | 216 | 4.24 | 47.8 |
| 1134 | 180 | 2.41 | 78.9 |
| 1135 | 142 | 0.864 | 63.2 |
| 1136 | 121 | 0.949 | 39.2 |
| 1137 | 663 | 2.05 | 36.2 |
| 1138 | 72.8 | 3.4 | 164 |
| 1139 | 269 | 2.87 | 155 |
| 1140 | 228 | 0.869 | 39.2 |
| 1141 | 169 | 0.816 | 47.5 |
| 1142 | 203 | 0.748 | 38 |
| 1143 | 182 | 0.751 | 49.6 |
| 1144 | 196 | 0.72 | 36.5 |
| 1145 | 148 | 0.848 | 39.1 |
| 1146 | 198 | 0.825 | 40.1 |
| 1147 | 167 | 0.831 | 45.4 |
| 1148 | 175 | 0.873 | 44.3 |
| 1149 | 184 | 0.96 | 52.2 |
| 1150 | 161 | 0.583 | 30 |
| 1151 | 206 | 0.287 | 40 |
| 1152 | 287 | 1.21 | 43.8 |
| 1153 | 215 | 1.39 | 52.7 |
| 1154 | 320 | 0.954 | 44.5 |
| 1155 | 288 | 0.888 | 44.4 |
| 1156 | 337 | 1.33 | 47.1 |
| 1157 | 384 | 1.28 | 57.5 |
| 1158 | 301 | 1.42 | 46.8 |
| 1159 | 238 | 1.29 | 64.1 |
| 1160 | 183 | 0.598 | 31.2 |
| 1161 | 217 | 0.733 | 35.5 |
| 1162 | 199 | 0.656 | 34.5 |
| 1163 | 163 | 0.721 | 35.4 |
| 1164 | 359 | 1.17 | 63.5 |
| 1165 | 358 | 1.36 | 87.7 |
| 1166 | 427 | 1.1 | 65.6 |
| 1167 | 274 | 1.22 | 89.2 |
| 1168 | 364 | 0.999 | 65.4 |
| 1169 | 304 | 1.18 | 80 |
| 1170 | 249 | 0.663 | 50.2 |
| 1171 | 233 | 0.718 | 52.9 |
| 1172 | 303 | 0.7 | 45.5 |
| 1173 | 254 | 0.764 | 59.1 |
| 1174 | 347 | 0.707 | 60.2 |
| 1175 | 282 | 0.768 | 60.7 |
| 1176 | 229 | 0.462 | 43.8 |
| 1177 | 156 | 0.544 | 43.6 |
| 1178 | 270 | 0.544 | 39 |
| 1179 | 197 | 0.58 | 37.9 |
| 1180 | 205 | 0.341 | 35.6 |
| 1181 | 203 | 0.666 | 48.2 |
| 1182 | 172 | 2.73 | 80.4 |
| 1183 | 127 | 3.16 | 53.6 |
| 1184 | 295 | 8.39 | 179 |
| 1185 | 206 | 2.31 | 66.1 |
| 1186 | 164 | 3.17 | 52.1 |
| 1187 | 370 | 7.11 | 154 |
| 1188 | 130 | 7.02 | 77.1 |
| 1189 | 248 | 0.584 | 45.4 |
| 1190 | 192 | 0.954 | 77.4 |
| 1191 | 243 | 0.931 | 82.3 |
| 1192 | 218 | 1.06 | 59.5 |
| 1193 | 202 | 0.803 | 66.2 |
| 1194 | 215 | 0.759 | 57.4 |
| 1195 | 242 | 0.637 | 44.2 |
| 1196 | 257 | 0.605 | 45.4 |
| 1197 | 288 | 0.639 | 46.1 |
| 1198 | 314 | 0.67 | 61 |
| 1199 | 352 | 0.733 | 63.9 |
| 1200 | 278 | 0.896 | 91.4 |
| 1201 | 234 | 1.02 | 93.9 |
| 1202 | 70.3 | 0.471 | 23.1 |
| 1203 | 436 | 8.5 | 38.9 |
| 1204 | 507 | 15.8 | 37.4 |
| 1205 | 325 | 16.3 | 50 |
| 1206 | 251 | 7.04 | 44.1 |
| 1207 | 470 | 0.633 | 39.8 |
| 1208 | 451 | 0.786 | 44.8 |
| 1209 | 124 | 0.565 | 37.7 |
| 1210 | 288 | 0.635 | 38.1 |
| 1211 | 211 | 0.489 | 33.2 |
| 1212 | 230 | 0.614 | 38.2 |
| 1213 | 268 | 0.616 | 44 |
| 1214 | 210 | 0.771 | 50 |
| 1215 | 272 | 0.937 | 58.5 |
| 1216 | 225 | 0.914 | 66.9 |
| 1217 | 253 | 1.06 | 62.7 |
| 1218 | 185 | 0.626 | 48.7 |
| 1219 | 168 | 0.629 | 46.8 |
| 1220 | 168 | 0.609 | 48.5 |
| 1221 | 185 | 0.814 | 57.8 |
| 1222 | 470 | 12.4 | 44.8 |
| 1223 | 472 | 9.25 | 40.7 |
| 1224 | 208 | 3.78 | 28.4 |
| 1225 | 275 | 3.67 | 31.4 |
| 1226 | 184 | 0.443 | 34.4 |
| 1227 | 199 | 0.527 | 39.5 |
| 1228 | 185 | 0.522 | 39.1 |
| 1229 | 175 | 0.504 | 37.7 |
| 1230 | 68.4 | 0.0152 | 1.14 |
| 1231 | 17.1 | 0.00994 | 1.22 |
| 1232 | 8.53 | 0.00687 | 0.694 |
| 1233 | 9.9 | 0.00988 | 1.06 |
| 1234 | 11.7 | 0.011 | 1.15 |
| 1235 | >9950 | 20.3 | 1800 |
| 1236 | 502 | 11.9 | 95.8 |

NOTE:
EC₅₀ determination of human GLP-1(7-36)NH₂ at human GLP-1R, human Gcg at human GcgR, and human GIP(1-42)NH₂ at human GIP-R: the peptide concentration ranges were 346 pM to 9950 nM. EC₅₀ determination of Examples at human GLP-1R, human GcgR, and human GIP-R: the peptide concentration ranges were 6.87 pM to 9.95 μM.

[0866] As seen in Table 2, in the presence of HSA, exemplary analogs have agonist activities as determined by human GIP-R, GLP-1R, and GcgR cAMP assays, which are lower than the native ligands.

[0867] To determine the intrinsic potency of exemplary analogs and comparator molecules, the CAMP assays described above were performed in the presence of 0.1% casein only (without human serum albumin). Casein is used as a nonspecific blocker in both cAMP assays and does not interact with the fatty acid moieties of the analyzed molecules.

[0868] Intracellular cAMP levels are determined by extrapolation using a standard curve. Dose response curves of compounds are plotted as the percentage of stimulation normalized to minimum (buffer only) and maximum (maximum concentration of each control ligand) values and analyzed using a four parameter non-linear regression fit with a variable slope (Genedata Screener 13). EC₅₀ is the concentration of compound causing half-maximal simulation in a dose response curve. Each relative EC₅₀ value for the Geometric mean calculation is determined from a curve fitting.

[0869] Data are provided below in Table 3.

TABLE 3
Functional Activation of hGLP-1R, hGIPR,
hGcgR in the Presence of 0.1% Casein.

| | Relative cAMP EC₅₀, nM | | |
|---|---|---|---|
| Example | hGcgR | hGIPR | hGLP-1R |
| hGcg | 2.07 | >300 | 116 |
| hGIP 1-42 amide | >99.5 | 0.498 | >9950 |
| hGLP-1 7-36 amide | >99.5 | >99.5 | 0.314 |
| 1 | 3.72 | 0.207 | 1.42 |
| 2 | 4.29 | 0.207 | 1.65 |
| 3 | 3.8 | 0.217 | 1.67 |
| 4 | 3.2 | 0.192 | 1.66 |
| 5 | 7.4 | 0.177 | 2.37 |
| 6 | 6.89 | 0.232 | 1.95 |
| 7 | 5.05 | 0.203 | 2.11 |
| 8 | 6.65 | 0.231 | 2.11 |
| 9 | 7.19 | 0.205 | 1.61 |
| 10 | 7.62 | 0.226 | 1.85 |
| 11 | 12.5 | 0.233 | 2.07 |
| 12 | 12.2 | 0.17 | 1.46 |
| 13 | 7.19 | 0.196 | 1.78 |
| 14 | 7.23 | 0.17 | 1.67 |
| 15 | 11.1 | 0.201 | 1.77 |
| 16 | 8.84 | 0.217 | 1.54 |
| 17 | 8.33 | 0.317 | 2.96 |
| 18 | 2.7 | 0.337 | 2.31 |
| 19 | 2.35 | 0.228 | 3.96 |
| 20 | 15.4 | 0.381 | 2.45 |
| 21 | 12.4 | 0.218 | 2.7 |
| 22 | 5.42 | 0.246 | 2.94 |
| 23 | 5.13 | 0.178 | 2.98 |
| 24 | 9.66 | 0.308 | 3.09 |
| 25 | 6.8 | 0.128 | 3.34 |
| 26 | 4.82 | 0.2 | 3.44 |
| 27 | 8.91 | 0.41 | 2.33 |
| 28 | 12.6 | 0.255 | 3.68 |
| 29 | 11.1 | 0.35 | 3.56 |
| 30 | 5.22 | 0.247 | 3.18 |
| 31 | 8.42 | 0.249 | 2.16 |
| 32 | 11.6 | 0.28 | 2.55 |
| 33 | 7.04 | 0.285 | 1.71 |
| 34 | 3.47 | 0.122 | 1.16 |
| 35 | 4.32 | 0.55 | 3.05 |
| 36 | 4.32 | 0.482 | 3.57 |
| 37 | 6.83 | 0.207 | 1.66 |
| 38 | 9.5 | 0.304 | 2.4 |
| 39 | 10.1 | 0.299 | 2.13 |
| 40 | 12.3 | 0.139 | 0.693 |
| 41 | 8.59 | 0.258 | 2.2 |
| 42 | 5.83 | 0.115 | 2.17 |
| 43 | 2.71 | 0.101 | 1.55 |
| 44 | 2.46 | 0.116 | 1.66 |
| 45 | 2.08 | 0.112 | 1.52 |
| 46 | 1.53 | 0.0947 | 4.04 |
| 47 | 5.61 | 0.388 | 3.4 |
| 48 | 3.8 | 0.27 | 2.99 |
| 49 | 5.54 | 0.324 | 0.706 |
| 50 | 4.25 | 0.29 | 4.65 |
| 51 | 5.15 | 0.421 | 5.8 |
| 52 | 5.84 | 0.449 | 5.18 |
| 53 | 4.19 | 0.518 | 3.31 |
| 54 | 3.77 | 0.502 | 3.95 |
| 55 | 5.2 | 0.0856 | 1.96 |
| 56 | 2.8 | 0.315 | 4.07 |
| 57 | 4.37 | 0.098 | 3.06 |
| 58 | 4.86 | 0.175 | 2.93 |
| 59 | 6.57 | 0.54 | 4.8 |
| 60 | 8.96 | 0.135 | 1.93 |
| 61 | 3.57 | 0.122 | 2.05 |
| 62 | 3.96 | 0.146 | 2.72 |
| 63 | 4.1 | 0.255 | 4.78 |
| 64 | 4.94 | 0.309 | 4.08 |
| 65 | 6.49 | 0.739 | 4.21 |
| 66 | 3.71 | 0.219 | 3.86 |
| 67 | 3.7 | 0.34 | 4.07 |
| 68 | 8.55 | 0.46 | 3.07 |
| 69 | 4.75 | 0.136 | 3.25 |
| 70 | 6.04 | 0.102 | 2.71 |
| 71 | 8.74 | 0.105 | 3.12 |
| 72 | 5.48 | 0.202 | 1.86 |
| 73 | 4.58 | 0.114 | 2.44 |
| 74 | 2.53 | 0.0708 | 3.32 |
| 75 | 4.51 | 0.0578 | 4.4 |
| 76 | 11.1 | 0.196 | 2.25 |
| 77 | 15.3 | 0.168 | 1.85 |
| 78 | 7.06 | 0.228 | 1.93 |
| 79 | 3.08 | 0.0773 | 1.8 |
| 80 | 7.44 | 0.0593 | 2.55 |
| 81 | 7.78 | 0.246 | 2.19 |
| 82 | 6.98 | 0.302 | 3.52 |
| 83 | 10.2 | 0.185 | 2.85 |
| 84 | 8.48 | 0.21 | 1.61 |
| 85 | 7.63 | 0.157 | 2.73 |
| 86 | 7.23 | 0.145 | 2.43 |
| 87 | 8.51 | 0.128 | 2.75 |
| 88 | 7.48 | 0.177 | 3.45 |
| 89 | 11.6 | 0.167 | 3.31 |
| 90 | 9.58 | 0.173 | 2.68 |
| 91 | 9.13 | 0.243 | 3.39 |
| 92 | 12 | 0.212 | 2.08 |
| 93 | 7.16 | 0.162 | 2.63 |
| 94 | 8.16 | 0.154 | 2.63 |
| 95 | 8.41 | 0.116 | 1.95 |
| 96 | 14.1 | 0.456 | 3.92 |
| 97 | 6.73 | 0.176 | 3.23 |
| 98 | 6.91 | 0.179 | 4.35 |
| 99 | 6.09 | 0.174 | 3.54 |
| 100 | 13.1 | 0.293 | 3.21 |
| 101 | 10 | 0.436 | 4.3 |
| 102 | 9.75 | 0.587 | 3.35 |
| 103 | 10.5 | 0.2 | 3.27 |
| 104 | 7.58 | 0.251 | 3.39 |
| 105 | 12.5 | 0.269 | 2.86 |
| 106 | 6.26 | 0.345 | 3.94 |
| 107 | 10.8 | 0.426 | 8.5 |
| 108 | 3.95 | 0.222 | 3.1 |
| 109 | 11.2 | 0.279 | 5.95 |
| 110 | 2.45 | 0.102 | 2.99 |
| 111 | 4.25 | 0.0888 | 5.06 |
| 112 | 11 | 0.233 | 5.77 |
| 113 | 12 | 0.24 | 3.93 |
| 114 | 5.63 | 0.14 | 6.38 |
| 115 | 10.6 | 0.457 | 7.6 |
| 116 | 3.96 | 0.382 | 7.83 |
| 117 | 4.75 | 0.267 | 6.4 |
| 118 | 7.02 | 0.43 | 6.03 |
| 119 | 5.6 | 0.179 | 3.67 |
| 120 | 5.85 | 0.44 | 4.77 |
| 121 | 4.89 | 0.172 | 2.38 |
| 122 | 3.95 | 0.189 | 3.93 |
| 123 | 4.55 | 0.531 | 4.82 |
| 124 | 2.92 | 0.344 | 6.14 |
| 125 | 3.97 | 0.503 | 4.12 |
| 126 | 6.81 | 0.264 | 3.97 |
| 127 | 4.35 | 0.312 | 4.8 |
| 128 | 6.76 | 0.307 | 3.5 |
| 129 | 2.01 | 0.134 | 1.87 |
| 130 | 3.74 | 0.411 | 4.29 |
| 131 | 2.64 | 0.416 | 5.51 |
| 132 | 2.63 | 0.21 | 5.72 |
| 133 | 1.64 | 0.15 | 3.6 |
| 134 | 7.28 | 0.152 | 3.36 |
| 135 | 2.53 | 0.246 | 3.3 |
| 136 | 8.73 | 0.221 | 3.8 |
| 137 | 4.43 | 0.269 | 3.18 |
| 138 | 4.79 | 0.262 | 3.54 |
| 139 | 2.94 | 0.244 | 3.11 |
| 140 | 4.83 | 0.205 | 7.79 |
| 141 | 1.77 | 0.21 | 1.96 |
| 142 | 3.49 | 0.216 | 4.37 |
| 143 | 4.51 | 0.211 | 2.44 |
| 144 | 14.8 | 0.23 | 4.02 |
| 145 | 3.14 | 0.539 | 4.26 |
| 146 | 2.04 | 0.362 | 2.73 |
| 147 | 4.39 | 0.343 | 4.26 |
| 148 | 3.92 | 0.352 | 2.82 |
| 149 | 12.6 | 0.46 | 3.85 |
| 150 | 5.37 | 0.346 | 2.63 |
| 151 | 3.5 | 0.0784 | 1.6 |
| 152 | 6.91 | 0.259 | 4.03 |
| 153 | 14.7 | 0.218 | 7.09 |
| 154 | 8.72 | 0.227 | 4.94 |
| 155 | 5.68 | 0.177 | 2.98 |
| 156 | 3.62 | 0.208 | 3.37 |
| 157 | 4.16 | 0.183 | 3.04 |
| 158 | 3.72 | 0.245 | 2.49 |
| 159 | 6.89 | 0.343 | 4.15 |
| 160 | 4.32 | 0.354 | 5.39 |
| 161 | 4.83 | 0.555 | 5.22 |
| 162 | 4.72 | 0.222 | 4.72 |
| 163 | 5.6 | 0.376 | 6.5 |
| 164 | 2.92 | 0.302 | 5.02 |
| 165 | 4.47 | 0.0956 | 6.52 |
| 166 | 3.82 | 0.118 | 6.96 |
| 167 | 5.05 | 0.101 | 6.19 |
| 168 | 5.54 | 0.233 | 2.44 |
| 169 | 11.7 | 0.209 | 6.17 |
| 170 | 5.29 | 0.401 | 4.11 |
| 171 | 3.86 | 0.2 | 2.89 |
| 172 | 3.38 | 0.174 | 3.5 |
| 173 | 3.6 | 0.168 | 2.32 |
| 174 | 4.24 | 0.198 | 2.33 |
| 175 | 4.92 | 0.218 | 4 |
| 176 | 4.1 | 0.212 | 2.92 |
| 177 | 4.22 | 0.213 | 2.97 |
| 178 | 7.29 | 0.34 | 4.01 |
| 179 | 4.82 | 0.104 | 5.81 |
| 180 | 2.44 | 0.14 | 5.08 |
| 181 | 6.25 | 0.133 | 4.39 |
| 182 | 5.33 | 0.0781 | 4.8 |
| 183 | 3.83 | 0.0759 | 5.03 |
| 184 | 5.23 | 0.162 | 5.02 |
| 185 | 3.5 | 0.123 | 5.46 |
| 186 | 4.67 | 0.107 | 5.26 |
| 187 | 14.8 | 0.111 | 1.11 |
| 188 | 10.8 | 0.193 | 3.43 |
| 189 | 6.28 | 0.0695 | 4.46 |
| 190 | 2.95 | 0.306 | 1.41 |
| 191 | 2.11 | 0.422 | 2.48 |
| 192 | 4.18 | 0.142 | 9.77 |
| 193 | 4.51 | 0.0609 | 5.19 |
| 194 | 4.32 | 0.212 | 4.69 |
| 195 | 3.1 | 0.145 | 6.13 |
| 196 | 8.83 | 0.42 | 5.67 |
| 197 | 3.23 | 0.31 | 4.81 |
| 198 | 6.85 | 0.182 | 4.36 |
| 199 | 5.8 | 0.232 | 4.91 |
| 200 | 2.83 | 0.0739 | 3.19 |
| 201 | 3.84 | 0.0553 | 3.16 |
| 202 | 11.4 | 0.0965 | 4.79 |
| 203 | 6.92 | 0.125 | 4.72 |
| 204 | 6.92 | 0.181 | 2.34 |
| 205 | 8.98 | 0.16 | 2.71 |
| 206 | 2.2 | 0.224 | 2.77 |
| 207 | 4.24 | 0.321 | 4.36 |
| 208 | 2.69 | 0.159 | 3.72 |
| 209 | 3.08 | 0.129 | 1.78 |
| 210 | 2.81 | 0.153 | 1.44 |
| 211 | 2.05 | 0.116 | 1.23 |
| 212 | 3.74 | 0.13 | 1.35 |
| 213 | 3.61 | 0.124 | 1.9 |
| 214 | 2.49 | 0.103 | 1.22 |
| 215 | 9.77 | 0.418 | 0.803 |
| 216 | 2.7 | 0.0887 | 0.52 |
| 217 | 5.11 | 0.0897 | 0.667 |
| 218 | 7.89 | 0.0853 | 0.76 |
| 219 | 7.77 | 0.119 | 0.835 |
| 220 | 11.2 | 0.411 | 1.01 |
| 221 | 11.3 | 0.105 | 0.629 |
| 222 | 2.33 | 0.228 | 3.64 |
| 223 | 1.57 | 0.215 | 2.83 |
| 224 | 1.91 | 0.114 | 1.89 |
| 225 | 2.36 | 0.213 | 2.44 |
| 226 | 3.08 | 0.127 | 1.97 |
| 227 | 4.22 | 0.17 | 2.34 |
| 228 | 1.38 | 0.147 | 1.52 |
| 229 | 2.3 | 0.179 | 1.58 |
| 230 | 1.61 | 0.0909 | 0.937 |
| 231 | 2.12 | 0.119 | 1.3 |
| 232 | 2.42 | 0.102 | 0.819 |
| 233 | 2.25 | 0.0884 | 0.874 |
| 234 | 7.87 | 0.322 | 4.72 |
| 235 | 4.35 | 0.388 | 3.55 |
| 236 | 2.23 | 0.309 | 3.33 |
| 237 | 3.77 | 0.228 | 3.4 |
| 238 | 2.78 | 0.0909 | 2.71 |
| 239 | 2.14 | 0.0503 | 2.9 |
| 240 | 2.02 | 0.214 | 3.62 |
| 241 | 2.71 | 0.0748 | 2.3 |
| 242 | 3.5 | 0.0916 | 3.42 |
| 243 | 6.86 | 0.178 | 6.46 |
| 244 | 4.81 | 0.0972 | 7.68 |
| 245 | 7.07 | 0.0684 | 5.99 |
| 246 | 2.38 | 0.106 | 3.91 |
| 247 | 1.76 | 0.0794 | 2.8 |
| 248 | 3.36 | 0.0861 | 3.17 |
| 249 | 5.55 | 0.173 | 2.4 |
| 250 | 3.81 | 0.154 | 2.08 |
| 251 | 6.98 | 0.153 | 2.64 |
| 252 | 2.61 | 0.147 | 3.54 |
| 253 | 6.62 | 0.115 | 2.2 |
| 254 | 4.9 | 0.121 | 3.08 |
| 255 | 5.48 | 0.107 | 1.9 |
| 256 | 5.71 | 0.176 | 2.87 |
| 257 | 7.36 | 0.135 | 2.66 |
| 258 | 7.15 | 0.154 | 2.71 |
| 259 | 2.55 | 0.114 | 1.47 |
| 260 | 5.04 | 0.251 | 3.85 |
| 261 | 5.49 | 0.29 | 3.12 |
| 262 | 9.77 | 0.232 | 4.39 |
| 263 | 7.53 | 0.169 | 1.32 |
| 264 | 6.29 | 0.0884 | 4.67 |
| 265 | 5.63 | 0.239 | 2.73 |
| 266 | 4.57 | 0.166 | 4.77 |
| 267 | 5.74 | 0.279 | 5.86 |
| 268 | 7.69 | 0.274 | 3.14 |
| 269 | 7.69 | 0.288 | 3.23 |
| 270 | 5 | 0.26 | 3.2 |
| 271 | 8.51 | 0.152 | 5 |
| 272 | 7.91 | 0.254 | 2.62 |
| 273 | 6.96 | 0.243 | 4.02 |
| 274 | 9.37 | 0.296 | 4.9 |
| 275 | 7.8 | 0.318 | 4.93 |
| 276 | 2.82 | 0.0708 | 2.61 |
| 277 | 10.6 | 0.0672 | 5.56 |
| 278 | 4.45 | 0.0963 | 4.11 |
| 279 | 5.06 | 0.105 | 5.77 |
| 280 | 8.63 | 0.105 | 0.95 |
| 281 | 13.7 | 0.154 | 1.6 |
| 282 | 6.98 | 0.163 | 1.09 |
| 283 | 9.73 | 0.225 | 1.16 |
| 284 | 9.21 | 0.347 | 1.54 |
| 285 | 2.32 | 0.0652 | 2.87 |
| 286 | 2.2 | 0.0845 | 3.45 |
| 287 | 2.53 | 0.0633 | 4.25 |
| 288 | 5.17 | 0.234 | 1.89 |
| 289 | 5.02 | 0.382 | 0.449 |
| 290 | 2.68 | 0.43 | 0.34 |
| 291 | 1.88 | 0.26 | 0.22 |
| 292 | 1.84 | 1.02 | 1.03 |
| 293 | 4.01 | 0.0587 | 0.994 |
| 294 | 1.07 | 0.318 | 2.16 |
| 295 | 2.15 | 0.126 | 0.831 |
| 296 | 1.72 | 0.0806 | 0.536 |
| 297 | 3.26 | 0.626 | 2.96 |
| 298 | 1.04 | 0.138 | 0.277 |
| 299 | 2.54 | 0.137 | 0.963 |
| 300 | 6.54 | 0.0975 | 1.05 |
| 301 | 6.73 | 0.722 | 0.641 |
| 302 | 4.47 | 0.7 | 0.621 |
| 303 | 6.1 | 0.116 | 1.13 |
| 304 | 2.31 | 0.127 | 0.551 |
| 305 | 6.73 | 1 | 1.48 |
| 306 | 5.8 | 0.142 | 0.335 |
| 307 | 1.68 | 0.446 | 0.836 |
| 308 | 14.2 | NA | 3.15 |
| 309 | 9.28 | 0.32 | 0.808 |
| 310 | 3.52 | 0.0939 | 0.586 |
| 311 | 2.08 | 0.113 | 3.36 |
| 312 | 7.5 | 0.504 | 2.66 |
| 313 | 4.11 | 0.49 | 0.304 |
| 314 | 3.7 | 0.345 | 0.274 |
| 315 | 4.05 | 0.398 | 0.508 |
| 316 | 5.22 | 0.259 | 0.362 |
| 317 | 2.42 | 0.474 | 1.32 |
| 318 | 5.03 | 0.378 | 0.698 |
| 319 | 4.81 | 0.485 | 0.947 |
| 320 | 6.87 | 0.274 | 2.58 |
| 321 | 4.49 | 0.0912 | 0.798 |
| 322 | 5.41 | 0.264 | 0.394 |
| 323 | 6.04 | 0.232 | 1.56 |
| 324 | 5.74 | 0.164 | 4.4 |
| 325 | 2.43 | 0.351 | 1.56 |
| 326 | 5.34 | 0.3 | 0.555 |
| 327 | 3.04 | 0.312 | 1.61 |
| 328 | 10.3 | 0.544 | 1.3 |
| 329 | 3.47 | 0.207 | 0.926 |
| 330 | 3.91 | 0.0783 | 0.63 |
| 331 | 1.66 | 0.148 | 0.663 |
| 332 | 11.8 | 0.413 | 1.24 |
| 333 | 7.09 | 0.265 | 0.705 |
| 334 | 6.77 | 0.223 | 0.707 |
| 335 | 6.11 | 0.292 | 0.461 |
| 336 | 7.05 | 0.306 | 0.921 |
| 337 | 5.95 | 0.332 | 0.686 |
| 338 | 4.02 | 0.0733 | 1.22 |
| 339 | 6.81 | 0.101 | 1.06 |
| 340 | 2.02 | 0.189 | 0.648 |
| 341 | 10.7 | 0.213 | 1.62 |
| 342 | 10.2 | 0.347 | 0.419 |
| 343 | 6.83 | 0.184 | 1.31 |
| 344 | 9.05 | 0.406 | 2.56 |
| 345 | 11.3 | 0.0377 | 0.658 |
| 346 | 15.6 | 0.0738 | 1.17 |
| 347 | 8.88 | 0.0634 | 0.798 |
| 348 | 3.9 | 0.127 | 0.346 |
| 349 | 5.12 | 0.152 | 0.555 |
| 350 | 10.4 | 0.106 | 0.776 |
| 351 | 12.1 | 0.243 | 0.679 |
| 352 | 16.4 | 0.245 | 0.967 |
| 353 | 11 | 0.127 | 0.634 |
| 354 | 7.91 | 0.134 | 1.21 |
| 355 | 5.87 | 0.0811 | 1.01 |
| 356 | 4.76 | 0.0613 | 0.599 |
| 357 | 6.21 | 0.077 | 0.625 |
| 358 | 2.78 | 0.182 | 2.31 |
| 359 | 2.1 | 0.281 | 4.61 |
| 360 | 5.28 | 0.45 | 5.86 |
| 361 | 2.73 | 0.214 | 2.08 |
| 362 | 6.04 | 0.262 | 1.77 |
| 363 | 13.6 | 0.375 | 1.47 |
| 364 | 10.2 | 0.457 | 1.1 |
| 365 | 4.24 | 0.0336 | 0.265 |
| 366 | 4.51 | 0.024 | 0.744 |
| 367 | 7.95 | 0.0215 | 0.421 |
| 368 | 0.481 | 0.0121 | 0.242 |
| 369 | 0.873 | 0.0263 | 0.301 |
| 370 | 7.06 | 0.027 | 0.406 |
| 371 | 4.46 | 0.0128 | 0.327 |
| 372 | 7.54 | 0.0161 | 0.333 |
| 373 | 4.48 | 0.0183 | 0.392 |
| 374 | 0.908 | 0.0186 | 0.336 |
| 375 | 1.32 | 0.0165 | 0.299 |
| 376 | 1.71 | 0.0354 | 0.445 |
| 377 | 1.36 | 0.0377 | 0.367 |
| 378 | 1.45 | 0.0213 | 0.251 |
| 379 | 2.27 | 0.0946 | 0.158 |
| 380 | 1.17 | 0.0346 | 0.354 |
| 381 | 1.39 | 0.0156 | 0.157 |
| 382 | 3.72 | 0.0368 | 0.291 |
| 383 | 1.27 | 0.0406 | 0.258 |
| 384 | 5.77 | 0.0152 | 0.133 |
| 385 | 1 | 0.0141 | 0.235 |
| 386 | 1.7 | 0.0156 | 0.278 |
| 387 | 2.14 | 0.0276 | 0.255 |
| 388 | 2.15 | 0.0462 | 0.373 |
| 389 | 4.03 | 0.0354 | 0.134 |
| 390 | 3.08 | 0.122 | 0.134 |
| 391 | 3.04 | 0.0298 | 0.199 |
| 392 | 3.02 | 0.0571 | 0.253 |
| 393 | 0.947 | 0.0458 | 0.211 |
| 394 | 5.63 | 0.018 | 0.226 |
| 395 | 5.55 | 0.0248 | 0.349 |
| 396 | 4.99 | 0.024 | 0.293 |
| 397 | 5.22 | 0.0247 | 0.2 |
| 398 | 2.16 | 0.0318 | 0.186 |
| 399 | 1.51 | 0.0413 | 0.302 |
| 400 | 2.53 | 0.0158 | 0.253 |
| 401 | 1.99 | 0.0183 | 0.213 |
| 402 | 5.66 | 0.123 | 0.725 |
| 403 | 1.59 | 0.0827 | 0.396 |
| 404 | 4.1 | 0.0102 | 0.217 |
| 405 | 15.5 | 0.28 | 1.48 |
| 406 | 1.23 | 0.0233 | 0.208 |
| 407 | 1.49 | 0.0362 | 0.259 |
| 408 | 1.93 | 0.0329 | 0.253 |
| 409 | 7.92 | 0.363 | 0.484 |
| 410 | 9.94 | 0.0708 | 0.354 |
| 411 | 3.94 | 0.058 | 0.709 |
| 412 | 2.36 | 0.0351 | 0.282 |
| 413 | 6.3 | 0.0881 | 0.564 |
| 414 | 4.56 | 0.0303 | 0.176 |
| 415 | 8.64 | 0.0496 | 0.38 |
| 416 | 2.08 | 0.0393 | 0.331 |
| 417 | 2.83 | 0.0144 | 0.328 |
| 418 | 4.7 | 0.0153 | 0.264 |
| 419 | 8.52 | 0.0235 | 0.615 |
| 420 | 2.49 | 0.0131 | 0.205 |
| 421 | 3.25 | 0.0132 | 0.21 |
| 422 | 14.5 | 0.0216 | 0.252 |
| 423 | 1.92 | 0.0114 | 0.194 |
| 424 | 3.12 | 0.0154 | 0.318 |
| 425 | 5.49 | 0.0997 | 0.15 |
| 426 | 4.33 | 0.079 | 0.139 |
| 427 | 3.81 | 0.0121 | 0.282 |
| 428 | 2.35 | 0.01 | 0.207 |
| 429 | 1.19 | 0.0142 | 0.178 |
| 430 | 2.11 | 0.0144 | 0.438 |
| 431 | 3.32 | 0.0157 | 0.392 |
| 432 | 1.6 | 0.0297 | 0.431 |
| 433 | 5.78 | 0.0206 | 0.273 |
| 434 | 2.84 | 0.0226 | 0.236 |
| 435 | 3.01 | 0.0239 | 0.311 |
| 436 | 2.27 | 0.0294 | 0.173 |
| 437 | 1.76 | 0.0872 | 0.421 |
| 438 | 3.62 | 0.225 | 0.815 |
| 439 | 4.38 | 0.0634 | 0.293 |
| 440 | 7.14 | 0.0226 | 0.467 |
| 441 | 8 | 0.0239 | 0.365 |
| 442 | 5.66 | 0.0237 | 0.267 |
| 443 | 6.09 | 0.0291 | 0.572 |
| 444 | 6.49 | 0.0106 | 0.352 |
| 445 | 10.1 | 0.0206 | 0.731 |
| 446 | 8.34 | 0.0351 | 0.696 |
| 447 | 9.71 | 0.0177 | 0.214 |
| 448 | 4.54 | 0.0171 | 0.336 |
| 449 | 11.5 | 0.0205 | 0.568 |
| 450 | 4.84 | 0.0448 | 0.43 |
| 451 | 4.12 | 0.0101 | 0.256 |
| 452 | 2.44 | 0.0118 | 0.235 |
| 453 | 7.37 | 0.0184 | 0.374 |
| 454 | 9.11 | 0.0154 | 0.821 |
| 455 | 4.36 | 0.0182 | 0.49 |
| 456 | 3.48 | 0.00913 | 0.19 |
| 457 | 2.86 | 0.00918 | 0.226 |
| 458 | 5.29 | 0.0448 | 0.347 |
| 459 | 1.21 | 0.0122 | 0.179 |
| 460 | 1.89 | 0.0624 | 0.636 |
| 461 | 1.53 | 0.0171 | 0.194 |
| 462 | 1.69 | 0.0148 | 0.204 |
| 463 | 4.27 | 0.0558 | 0.362 |
| 464 | 1.25 | 0.072 | 0.466 |
| 465 | 1.5 | 0.148 | 0.575 |
| 466 | 5.84 | 0.0466 | 0.207 |
| 467 | 9.34 | 0.0855 | 0.358 |
| 468 | 1.95 | 0.0222 | 0.466 |
| 469 | 1.34 | 0.031 | 0.562 |
| 470 | 2.35 | 0.0263 | 0.323 |
| 471 | 2.19 | 0.0296 | 0.317 |
| 472 | 2.73 | 0.015 | 0.171 |
| 473 | 2.72 | 0.0101 | 0.173 |
| 474 | 3.88 | 0.0125 | 0.236 |
| 475 | 2.24 | 0.0173 | 0.254 |
| 476 | 1.34 | 0.0131 | 0.164 |
| 477 | 5.26 | 0.0127 | 0.173 |
| 478 | 8.07 | 0.106 | 0.243 |
| 479 | 5.98 | 0.0905 | 0.314 |
| 480 | 1.47 | 0.0107 | 0.215 |
| 481 | 1.22 | 0.0164 | 0.204 |
| 482 | 1.41 | 0.0139 | 0.177 |
| 483 | 1.77 | 0.0133 | 0.188 |
| 484 | 3.99 | 0.0152 | 0.201 |
| 485 | 4.29 | 0.0194 | 0.277 |
| 486 | 4.43 | 0.0262 | 0.375 |
| 487 | 5.36 | 0.0286 | 0.639 |
| 488 | 5.13 | 0.0263 | 0.682 |
| 489 | 2.31 | 0.0121 | 0.172 |
| 490 | 3.05 | 0.0159 | 0.183 |
| 491 | 1.58 | 0.0126 | 0.17 |
| 492 | 1.35 | 0.0119 | 0.146 |
| 493 | 6.25 | 0.0406 | 0.644 |
| 494 | 1.26 | 0.014 | 0.211 |
| 495 | 1.75 | 0.0361 | 0.274 |
| 496 | 8.25 | 0.387 | 9.69 |
| 497 | 2.70 | 0.297 | 1.08 |
| 498 | 4.11 | 0.0711 | 1.53 |
| 499 | 1.39 | 0.0274 | 0.219 |
| 500 | 4.04 | 0.0375 | 0.623 |
| 501 | 4.54 | 0.0373 | 0.401 |
| 502 | 3.8 | 0.0337 | 0.326 |
| 503 | 3.98 | 0.0518 | 0.525 |
| 504 | 2.83 | 0.0364 | 0.253 |
| 505 | 0.445 | 0.00707 | 0.205 |
| 506 | 17.1 | 0.308 | 2.14 |
| 507 | 1.86 | 0.0127 | 0.187 |
| 508 | 1.82 | 0.00883 | 0.173 |
| 509 | 4.66 | 0.0557 | 0.65 |
| 510 | 5.44 | 0.0627 | 0.71 |
| 511 | 8.75 | 0.0914 | 1.05 |
| 512 | 7.34 | 0.0697 | 1.32 |
| 513 | 9.58 | 0.0956 | 0.634 |
| 514 | 6.68 | 0.0744 | 0.623 |
| 515 | 6.47 | 0.0893 | 0.825 |
| 516 | 8.45 | 0.112 | 0.907 |
| 517 | 4.69 | 0.158 | 0.646 |
| 518 | 3.93 | 0.129 | 0.867 |
| 519 | 4.71 | 0.212 | 1.04 |
| 520 | 6.09 | 0.224 | 1.04 |
| 521 | 4.04 | 0.0164 | 0.341 |
| 522 | 6.32 | 0.033 | 0.51 |
| 523 | 3.79 | 0.021 | 0.482 |
| 524 | 5.11 | 0.0266 | 0.487 |
| 525 | 10 | 0.0351 | 0.426 |
| 526 | 8.62 | 0.0364 | 0.421 |
| 527 | 6.99 | 0.0386 | 0.446 |
| 528 | 7 | 0.0333 | 0.434 |
| 529 | 6.59 | 0.0273 | 0.467 |
| 530 | 17.1 | 0.874 | 4.91 |
| 531 | 3.79 | 0.0694 | 0.356 |
| 532 | 1.37 | 0.0159 | 0.577 |
| 533 | 5.02 | 0.0388 | 0.334 |
| 534 | 4.58 | 0.0523 | 0.395 |
| 535 | 3.16 | 0.0183 | 0.418 |
| 536 | 5.83 | 0.0211 | 0.521 |
| 537 | 5.9 | 0.0641 | 0.538 |
| 538 | 6.93 | 0.0672 | 0.533 |
| 539 | 4.97 | 0.0247 | 0.521 |
| 540 | 5.62 | 0.0296 | 0.686 |
| 541 | 4.26 | 0.0213 | 0.74 |
| 542 | 5.03 | 0.0336 | 0.388 |
| 543 | 4.56 | 0.0319 | 0.41 |
| 544 | 2.71 | 0.041 | 0.623 |
| 545 | 2.71 | 0.0432 | 0.602 |
| 546 | 3.67 | 0.25 | 0.517 |
| 547 | 3.8 | 0.152 | 0.337 |
| 548 | 3.94 | 0.0547 | 0.478 |
| 549 | 3.41 | 0.0255 | 0.395 |
| 550 | 11.7 | 0.0876 | 2.12 |
| 551 | 1.74 | 0.0173 | 0.303 |
| 552 | 2.53 | 0.0177 | 0.804 |
| 553 | 4.53 | 0.0371 | 0.398 |
| 554 | 6.83 | 0.0323 | 0.423 |
| 555 | 3.56 | 0.0601 | 0.445 |
| 556 | 4.14 | 0.0866 | 0.561 |
| 557 | 3.42 | 0.0486 | 0.45 |
| 558 | 4.42 | 0.0564 | 0.526 |
| 559 | 4.07 | 0.119 | 0.542 |
| 560 | 3.8 | 0.113 | 0.883 |
| 561 | 5.43 | 0.212 | 1.13 |
| 562 | 6 | 0.284 | 1.67 |
| 563 | 8.3 | 0.132 | 1.01 |
| 564 | 10.2 | 0.176 | 1.33 |
| 565 | 10.3 | 0.107 | 1.24 |
| 566 | 7.18 | 0.137 | 1.3 |
| 567 | 5.89 | 0.165 | 1.07 |
| 568 | 6.13 | 0.125 | 0.986 |
| 569 | 4.34 | 0.199 | 1.12 |
| 570 | 5.88 | 0.186 | 1.03 |
| 571 | 3.27 | 0.0746 | 0.603 |
| 572 | 3.48 | 0.0465 | 0.366 |
| 573 | 4.02 | 0.0342 | 0.416 |
| 574 | 5.04 | 0.235 | 0.499 |
| 575 | 3.69 | 0.321 | 0.438 |
| 576 | 6.37 | 0.0723 | 0.528 |
| 577 | 6.47 | 0.103 | 0.931 |
| 578 | 6.26 | 0.0208 | 0.233 |
| 579 | 2.36 | 0.0171 | 0.252 |
| 580 | 7.27 | 0.0426 | 0.615 |
| 581 | 8.18 | 0.0812 | 0.406 |
| 582 | 10.5 | 0.103 | 0.298 |
| 583 | 6.32 | 0.0692 | 0.542 |
| 584 | 5.29 | 0.0461 | 1 |
| 585 | 6.25 | 0.0801 | 0.601 |
| 586 | 4.58 | 0.0461 | 0.593 |
| 587 | 5.38 | 0.0635 | 0.611 |
| 588 | 4.72 | 0.0777 | 0.613 |
| 589 | 4.11 | 0.0672 | 0.713 |
| 590 | 4.34 | 0.105 | 0.89 |
| 591 | 4.67 | 0.0579 | 0.773 |
| 592 | 4.25 | 0.0971 | 1.12 |
| 593 | 6.57 | 0.0484 | 0.495 |
| 594 | 8.35 | 0.0541 | 0.561 |
| 595 | 5.06 | 0.0338 | 0.53 |
| 596 | 5.71 | 0.0455 | 0.592 |
| 597 | 5.2 | 0.0643 | 0.6 |
| 598 | 8.79 | 0.0927 | 0.886 |
| 599 | 2.9 | 0.0558 | 0.409 |
| 600 | 2.97 | 0.0478 | 0.377 |
| 601 | 3.88 | 0.0688 | 0.443 |
| 602 | 4.21 | 0.0726 | 0.775 |
| 603 | 5.43 | 0.102 | 0.688 |
| 604 | 5.5 | 0.161 | 0.705 |
| 605 | 5.49 | 0.132 | 0.795 |
| 606 | 5.01 | 0.17 | 0.786 |
| 607 | 8.91 | 0.0879 | 1.15 |
| 608 | 7.82 | 0.124 | 1.87 |
| 609 | 6.46 | 0.0784 | 1.07 |
| 610 | 5.75 | 0.133 | 1.66 |
| 611 | 6.8 | 0.126 | 1.63 |
| 612 | 7.13 | 0.087 | 1.21 |
| 613 | 20.4 | 0.00925 | 0.698 |
| 614 | 6.36 | 0.0065 | 0.251 |
| 615 | 3.93 | 0.00825 | 0.575 |
| 616 | 6.58 | 0.00727 | 0.29 |
| 617 | 4.56 | 0.00849 | 0.534 |
| 618 | 5.57 | 0.0418 | 1.53 |
| 619 | 6.34 | 0.0685 | 0.992 |
| 620 | 8.26 | 0.0706 | 0.981 |
| 621 | 6.81 | 0.0661 | 1.28 |
| 622 | 7.7 | 0.0148 | 0.776 |
| 623 | 7.94 | 0.0224 | 0.907 |
| 624 | 8.42 | 0.0222 | 0.95 |
| 625 | 8.53 | 0.0291 | 1.16 |
| 626 | 8.72 | 0.0192 | 0.889 |
| 627 | 8.82 | 0.0261 | 1.22 |
| 628 | 7.47 | 0.0278 | 1.11 |
| 629 | 9.75 | 0.029 | 1.58 |
| 630 | 8.07 | 0.0233 | 0.762 |
| 631 | 16.8 | 0.0375 | 0.658 |
| 632 | 13.5 | 0.068 | 0.951 |
| 633 | 10.2 | 0.0186 | 0.421 |
| 634 | 6.49 | 0.0195 | 0.403 |
| 635 | 7.09 | 0.0405 | 0.625 |
| 636 | 9.28 | 0.054 | 0.504 |
| 637 | 11.7 | 0.108 | 1.08 |
| 638 | 14 | 0.0354 | 0.4 |
| 639 | 8 | 0.0231 | 0.374 |
| 640 | 9.5 | 0.00696 | 0.288 |
| 641 | 3.72 | 0.00819 | 0.489 |
| 642 | 3.49 | 0.00796 | 0.474 |
| 643 | 16 | 0.0223 | 0.741 |
| 644 | 5.91 | 0.00649 | 0.309 |
| 645 | 3.25 | 0.00724 | 0.596 |
| 646 | 23.1 | 0.0336 | 2.58 |
| 647 | 18.8 | 0.0177 | 0.872 |
| 648 | 20.3 | 0.0392 | 1.76 |
| 649 | 21.2 | 0.0221 | 1.35 |
| 650 | 16.2 | 0.0814 | 0.649 |
| 651 | 10.7 | 0.112 | 1.02 |
| 652 | 15.3 | 0.0342 | 0.426 |
| 653 | 7.29 | 0.0303 | 0.426 |
| 654 | 2.66 | 0.0471 | 0.349 |
| 655 | 3.79 | 0.0533 | 0.351 |
| 656 | 2.04 | 0.0269 | 0.318 |
| 657 | 0.891 | 0.0393 | 0.429 |
| 658 | 1.05 | 0.0379 | 0.34 |
| 659 | 5.89 | 0.0673 | 1.31 |
| 660 | 7.38 | 0.0646 | 1.27 |
| 661 | 1.78 | 0.0665 | 1.13 |
| 662 | 4.81 | 0.0704 | 0.946 |
| 663 | 1.95 | 0.0893 | 1.29 |
| 664 | 2.12 | 0.0159 | 0.356 |
| 665 | 2.94 | 0.0223 | 0.284 |
| 666 | 2 | 0.0203 | 0.337 |
| 667 | 2.34 | 0.0217 | 0.42 |
| 668 | 2.03 | 0.0198 | 0.325 |
| 669 | 1.76 | 0.0145 | 0.27 |
| 670 | 3.28 | 0.0135 | 0.683 |
| 671 | 1.81 | 0.00807 | 0.166 |
| 672 | 1.19 | 0.014 | 0.389 |
| 673 | 2.31 | 0.00656 | 0.174 |
| 674 | 2.09 | 0.0264 | 0.21 |
| 675 | 2.15 | 0.0111 | 0.254 |
| 676 | 2.34 | 0.0106 | 0.267 |
| 677 | 2.21 | 0.0111 | 0.252 |
| 678 | 2.28 | 0.0132 | 0.251 |
| 679 | 3.22 | 0.0123 | 0.255 |
| 680 | 2 | 0.01 | 0.246 |
| 681 | 1.35 | 0.00663 | 0.257 |
| 682 | 1.91 | 0.00661 | 0.212 |
| 683 | 1.57 | 0.00798 | 0.214 |
| 684 | 2.16 | 0.00843 | 0.28 |
| 685 | 2.18 | 0.00809 | 0.308 |
| 686 | 2.43 | 0.00776 | 0.298 |
| 687 | 2.41 | 0.00903 | 0.277 |
| 688 | 2.06 | 0.00881 | 0.304 |
| 689 | 1.81 | 0.0104 | 0.214 |
| 690 | 1.65 | 0.00892 | 0.231 |
| 691 | 2.46 | 0.0117 | 0.26 |
| 692 | 2.14 | 0.0106 | 0.252 |
| 693 | 2.39 | 0.0104 | 0.161 |
| 694 | 2.04 | 0.00781 | 0.253 |
| 695 | 1.93 | 0.0136 | 0.254 |
| 696 | 1.75 | 0.00688 | 0.233 |
| 697 | 1.71 | 0.0109 | 0.235 |
| 698 | 1.53 | 0.0112 | 0.252 |
| 699 | 1.35 | 0.00663 | 0.196 |
| 700 | 1.31 | 0.00758 | 0.245 |
| 701 | 1.48 | 0.01 | 0.22 |
| 702 | 1.5 | 0.0116 | 0.243 |
| 703 | 1.56 | 0.0101 | 0.233 |
| 704 | 1.85 | 0.013 | 0.287 |
| 705 | 1.7 | 0.0128 | 0.305 |
| 706 | 2.18 | 0.00911 | 0.19 |
| 707 | 1.06 | 0.0107 | 0.248 |
| 708 | 1.44 | 0.00907 | 0.262 |
| 709 | 1.23 | 0.0129 | 0.323 |
| 710 | 1.52 | 0.00578 | 0.274 |
| 711 | 1.29 | 0.00861 | 0.355 |
| 712 | 1.36 | 0.00689 | 0.258 |
| 713 | 1.71 | 0.00928 | 0.331 |
| 714 | 1.76 | 0.00764 | 0.289 |
| 715 | 1 | 0.00644 | 0.267 |
| 716 | 1.12 | 0.00853 | 0.321 |
| 717 | 1.14 | 0.00721 | 0.283 |
| 718 | 1.2 | 0.00706 | 0.214 |
| 719 | 1.44 | 0.00998 | 0.22 |
| 720 | 1.78 | 0.0103 | 0.245 |
| 721 | 1.78 | 0.00774 | 0.233 |
| 722 | 1.71 | 0.01 | 0.252 |
| 723 | 1.82 | 0.0118 | 0.255 |
| 724 | 1.74 | 0.0102 | 0.256 |
| 725 | 1.49 | 0.0126 | 0.258 |
| 726 | 1.71 | 0.013 | 0.247 |
| 727 | 2.38 | 0.0109 | 0.271 |
| 728 | 2.45 | 0.0116 | 0.277 |
| 729 | 2.11 | 0.0113 | 0.288 |
| 730 | 2.46 | 0.0122 | 0.248 |
| 731 | 2.35 | 0.0117 | 0.267 |
| 732 | 2.18 | 0.0118 | 0.268 |
| 733 | 1.6 | 0.00894 | 0.293 |
| 734 | 2.08 | 0.0132 | 0.417 |
| 735 | 1.97 | 0.012 | 0.386 |
| 736 | 2.85 | 0.014 | 0.489 |
| 737 | 1.34 | 0.00804 | 0.285 |
| 738 | 1.87 | 0.00991 | 0.368 |
| 739 | 1.59 | 0.015 | 0.348 |
| 740 | 5.34 | 0.012 | 0.453 |
| 741 | 2.01 | 0.00612 | 0.239 |
| 742 | 1.25 | 0.00688 | 0.266 |
| 743 | 1.49 | 0.00694 | 0.259 |
| 744 | 1.04 | 0.00844 | 0.274 |
| 745 | 1.86 | 0.012 | 0.212 |
| 746 | 1.62 | 0.0119 | 0.261 |
| 747 | 1.71 | 0.00955 | 0.229 |
| 748 | 1.42 | 0.0105 | 0.258 |
| 749 | 2.21 | 0.00718 | 0.293 |
| 750 | 2 | 0.00784 | 0.302 |
| 751 | 1.9 | 0.00759 | 0.302 |
| 752 | 1.9 | 0.00689 | 0.274 |
| 753 | 2.7 | 0.0127 | 0.271 |
| 754 | 2.3 | 0.0102 | 0.222 |
| 755 | 2.31 | 0.00805 | 0.175 |
| 756 | 2.26 | 0.0096 | 0.212 |
| 757 | 2.32 | 0.00959 | 0.236 |
| 758 | 3.99 | 0.0212 | 0.195 |
| 759 | 1.29 | 0.00676 | 0.262 |
| 760 | 1.59 | 0.00722 | 0.395 |
| 761 | 1.5 | 0.00686 | 0.226 |
| 762 | 3.09 | 0.00882 | 0.273 |
| 763 | 1.57 | 0.00719 | 0.302 |
| 764 | 1.63 | 0.00626 | 0.289 |
| 765 | 0.952 | 0.0642 | 0.25 |
| 766 | 0.689 | 0.0323 | 0.273 |
| 767 | 1.13 | 0.00792 | 0.299 |
| 768 | 10.3 | 0.0294 | 0.259 |
| 769 | 1.33 | 0.00852 | 0.247 |
| 770 | 5.37 | 0.244 | 3.91 |
| 771 | 5.05 | 0.232 | 4.38 |
| 772 | 15.9 | 0.115 | 1.38 |
| 773 | 15.3 | 0.0974 | 1.97 |
| 774 | 13.7 | 0.128 | 1.89 |
| 775 | 4.36 | 0.105 | 0.993 |
| 776 | 3.73 | 0.112 | 0.889 |
| 777 | 3.89 | 0.113 | 0.913 |
| 778 | 4.39 | 0.136 | 1.16 |
| 779 | 4.58 | 0.112 | 0.949 |
| 780 | 4.84 | 0.111 | 1.26 |
| 781 | 4.46 | 0.065 | 1.41 |
| 782 | 4.96 | 0.0711 | 1.94 |
| 783 | 3.81 | 0.0806 | 2.13 |
| 784 | 5.21 | 0.0587 | 2.09 |
| 785 | 4.51 | 0.0859 | 2.3 |
| 786 | 4.46 | 0.0986 | 2.8 |
| 787 | 7.81 | 0.0675 | 2.55 |
| 788 | 3.36 | 0.0923 | 2.5 |
| 789 | 3.3 | 0.101 | 2.74 |
| 790 | 3.87 | 0.131 | 3.19 |
| 791 | 2.36 | 0.979 | 4.68 |
| 792 | 1.91 | 0.55 | 2.99 |
| 793 | 3.79 | 0.834 | 3.19 |
| 794 | 1.21 | 0.468 | 1.26 |
| 795 | 1.77 | 0.345 | 0.972 |
| 796 | 5.3 | 0.098 | 0.602 |
| 797 | 3.78 | 0.0781 | 0.449 |
| 798 | 12.1 | 0.0653 | 0.628 |
| 799 | 1.64 | 0.0668 | 0.462 |
| 800 | 21 | 0.283 | 0.486 |
| 801 | 5.51 | 0.147 | 0.938 |
| 802 | 16.6 | 0.124 | 1.41 |
| 803 | 9.75 | 0.232 | 2.02 |
| 804 | 11.5 | 0.0751 | 0.915 |
| 805 | 3.97 | 0.0875 | 0.715 |
| 806 | 8.25 | 0.124 | 0.706 |
| 807 | 12.4 | 0.108 | 1.72 |
| 808 | 1.65 | 0.187 | 3.58 |
| 809 | 1.74 | 0.194 | 1.87 |
| 810 | 3.3 | 0.156 | 2.09 |
| 811 | 0.724 | 0.14 | 1.48 |
| 812 | 1.05 | 0.0934 | 1.19 |
| 813 | 2.5 | 0.124 | 0.93 |
| 814 | 3.92 | 0.337 | 3.76 |
| 815 | 4.13 | 0.181 | 2.79 |
| 816 | 6.57 | 0.297 | 2.69 |
| 817 | 4.32 | 0.173 | 1.18 |
| 818 | 2.31 | 0.121 | 0.51 |
| 819 | 1.53 | 0.0428 | 0.847 |
| 820 | 6.83 | 0.121 | 2.78 |
| 821 | 6.74 | 0.152 | 2.79 |
| 822 | 11.6 | 0.186 | 2.51 |
| 823 | 7.75 | 0.171 | 2.96 |
| 824 | 7.92 | 0.123 | 2.43 |
| 825 | 5.53 | 0.12 | 3.4 |
| 826 | 5.59 | 0.581 | 2.75 |
| 827 | 4.23 | 0.12 | 0.593 |
| 828 | 3.58 | 0.149 | 1.17 |
| 829 | 2.41 | 0.124 | 1.15 |
| 830 | 3.21 | 0.132 | 0.791 |
| 831 | 4.63 | 0.604 | 0.672 |
| 832 | 9.1 | 0.187 | 1.07 |
| 833 | 3.2 | 0.114 | 1.28 |
| 834 | 3.36 | 0.094 | 2.64 |
| 835 | 3.83 | 0.382 | 2.84 |
| 836 | 17.1 | 0.294 | 0.794 |
| 837 | 7.24 | 0.209 | 0.551 |
| 838 | 20.7 | 0.225 | 0.379 |
| 839 | 5.05 | 0.221 | 0.469 |
| 840 | 8.38 | 0.147 | 0.481 |
| 841 | 9.71 | 0.194 | 0.336 |
| 842 | 2.35 | 0.284 | 1.08 |
| 843 | 3.41 | 0.334 | 0.874 |
| 844 | 2.83 | 0.27 | 0.61 |
| 845 | 0.626 | 0.178 | 0.161 |
| 846 | 1.19 | 0.204 | 0.82 |
| 847 | 1.44 | 0.182 | 0.598 |
| 848 | 3.22 | 0.148 | 2.29 |
| 849 | 6.66 | 0.306 | 0.661 |
| 850 | 28.4 | 0.346 | 0.451 |
| 851 | 3.38 | 0.215 | 3.06 |
| 852 | 2.26 | 0.34 | 0.871 |
| 853 | 26.5 | 0.224 | 0.507 |
| 854 | 4.31 | 0.158 | 3.32 |
| 855 | 2.67 | 0.271 | 0.908 |
| 856 | 4.41 | 0.237 | 3.37 |
| 857 | 6.21 | 0.441 | 0.433 |
| 858 | 3.44 | 0.0995 | 1.83 |
| 859 | 8.45 | 0.12 | 2.38 |
| 860 | 11 | 0.202 | 3.95 |
| 861 | 8.59 | 0.195 | 2.62 |
| 862 | 5.87 | 0.0896 | 1.7 |
| 863 | 2.22 | 0.136 | 1.98 |
| 864 | 3.56 | 0.048 | 1.05 |
| 865 | 1.48 | 0.0797 | 3.02 |
| 866 | 4.48 | 0.148 | 4.01 |
| 867 | 2.47 | 0.216 | 7.38 |
| 868 | 7.4 | 0.208 | 5.82 |
| 869 | 9.94 | 0.142 | 2 |
| 870 | 4.4 | 0.0698 | 0.962 |
| 871 | 12.6 | 0.2 | 2.92 |
| 872 | 4.18 | 0.205 | 1.01 |
| 873 | 2.07 | 0.306 | 0.907 |
| 874 | 2.19 | 0.142 | 0.991 |
| 875 | 3.65 | 0.101 | 0.771 |
| 876 | 3.28 | 0.053 | 0.456 |
| 877 | 3.6 | 0.0816 | 0.601 |
| 878 | 2.85 | 0.0743 | 0.748 |
| 879 | 2.16 | 0.169 | 4 |
| 880 | 3.53 | 0.116 | 7.69 |
| 881 | 4.09 | 0.211 | 2.87 |
| 882 | 2.73 | 0.129 | 2.33 |
| 883 | 4.02 | 0.0779 | 1.05 |
| 884 | 3.82 | 0.155 | 4.17 |
| 885 | 2.42 | 0.149 | 3.29 |
| 886 | 4.13 | 0.149 | 2.7 |
| 887 | 5.28 | 0.145 | 3 |
| 888 | 30.1 | 0.168 | 5.02 |
| 889 | 4.09 | 0.106 | 5.06 |
| 890 | 4.73 | 0.113 | 3.19 |
| 891 | 3.14 | 0.155 | 3.25 |
| 892 | 3.85 | 0.149 | 4.41 |
| 893 | 5.8 | 0.166 | 2.9 |
| 894 | 6.09 | 0.0752 | 2.01 |
| 895 | 4.68 | 0.111 | 3.72 |
| 896 | 10.6 | 0.12 | 4.64 |
| 897 | 3.62 | 0.157 | 3.29 |
| 898 | 3.39 | 0.287 | 4.62 |
| 899 | 4.4 | 0.133 | 4.11 |
| 900 | 4.74 | 0.173 | 3.99 |
| 901 | 9.09 | 0.17 | 1.26 |
| 902 | 15.9 | 0.19 | 2.58 |
| 903 | 12.9 | 0.277 | 2.7 |
| 904 | 9.88 | 0.194 | 1.94 |
| 905 | 12.3 | 0.217 | 2.52 |
| 906 | 14.7 | 0.212 | 2.48 |
| 907 | 5.79 | 0.103 | 1.15 |
| 908 | 8.11 | 0.246 | 1.2 |
| 909 | 6.82 | 0.121 | 1.72 |
| 910 | 9.76 | 0.111 | 1.49 |
| 911 | 9.53 | 0.197 | 1.09 |
| 912 | 3.76 | 0.0387 | 0.414 |
| 913 | 3.8 | 0.0349 | 1.05 |
| 914 | 10.6 | 0.0582 | 0.888 |
| 915 | 0.882 | 0.0988 | 1.5 |
| 916 | 1.09 | 0.0715 | 1.38 |
| 917 | 3.61 | 0.0724 | 1.52 |
| 918 | 3.35 | 0.173 | 2.85 |
| 919 | 3.51 | 0.182 | 3.91 |
| 920 | 4.61 | 0.0905 | 2.28 |
| 921 | 10.4 | 0.228 | 3.73 |
| 922 | 8.49 | 0.112 | 6.77 |
| 923 | 9.1 | 0.123 | 6.23 |
| 924 | 6.05 | 0.0798 | 3.12 |
| 925 | 8.19 | 0.147 | 4.19 |
| 926 | 13.2 | 0.166 | 7.71 |
| 927 | 15.8 | 0.213 | 8.34 |
| 928 | 6.85 | 0.0883 | 3.58 |
| 929 | 12.6 | 0.0953 | 7.51 |
| 930 | 13 | 0.244 | 11 |
| 931 | 12.2 | 0.256 | 11.3 |
| 932 | 2.67 | 0.188 | 1.61 |
| 933 | 5.51 | 0.259 | 2.32 |
| 934 | 2.73 | 0.0738 | 0.649 |
| 935 | 4.04 | 0.123 | 1.71 |
| 936 | 5.08 | 0.192 | 2.16 |
| 937 | 5.52 | 0.222 | 2.52 |
| 938 | 13.3 | 0.13 | 1.84 |
| 939 | 2.41 | 0.143 | 2.75 |
| 940 | 2.84 | 0.137 | 4.08 |
| 941 | 11.7 | 0.183 | 0.764 |
| 942 | 6.32 | 0.188 | 3.52 |
| 943 | 6.58 | 0.233 | 3.58 |
| 944 | 6.16 | 0.216 | 4.86 |
| 945 | 18 | 0.246 | 3.9 |
| 946 | 16.5 | 0.353 | 2.05 |
| 947 | 6.99 | 0.289 | 1.7 |
| 948 | 2.89 | 0.17 | 2.67 |
| 949 | 1.62 | 0.203 | 3.37 |
| 950 | 1.92 | 0.18 | 2.5 |
| 951 | 5.73 | 0.156 | 2.61 |
| 952 | 2.4 | 0.166 | 4.85 |
| 953 | 2.75 | 0.111 | 2.63 |
| 954 | 3.66 | 0.268 | 4.79 |
| 955 | 2.65 | 0.386 | 7.74 |
| 956 | 2.17 | 0.26 | 4.83 |
| 957 | 4.18 | 0.213 | 5.01 |
| 958 | 3.17 | 0.343 | 9.51 |
| 959 | 2.61 | 0.217 | 5.06 |
| 960 | 5.5 | 0.124 | 1.51 |
| 961 | 2.96 | 0.167 | 2.52 |
| 962 | 3.13 | 0.0972 | 1.36 |
| 963 | 5.81 | 0.244 | 1.77 |
| 964 | 2.75 | 0.288 | 2.67 |
| 965 | 3.35 | 0.13 | 1.39 |
| 966 | 1.87 | 0.15 | 1.23 |
| 967 | 1.94 | 0.205 | 1.75 |
| 968 | 4.72 | 0.0928 | 1.04 |
| 969 | 5.48 | 0.142 | 1.21 |
| 970 | 5.24 | 0.178 | 2 |
| 971 | 8.26 | 0.298 | 3.46 |
| 972 | 4.19 | 0.34 | 2.05 |
| 973 | 17.6 | 0.503 | 6.1 |
| 974 | 3.7 | 0.607 | 1.57 |
| 975 | 2.61 | 0.344 | 10.2 |
| 976 | 8.75 | 0.441 | 21.8 |
| 977 | 7.18 | 0.189 | 1.1 |
| 978 | 8.91 | 0.284 | 1.6 |
| 979 | 3.34 | 0.181 | 2.72 |
| 980 | 2.41 | 0.18 | 2.26 |
| 981 | 3.7 | 0.243 | 4.45 |
| 982 | 3.91 | 0.328 | 4.94 |
| 983 | 4.75 | 0.289 | 2.35 |
| 984 | 4.5 | 0.232 | 2.07 |
| 985 | 5.41 | 0.34 | 2.93 |
| 986 | 4.94 | 0.299 | 3.06 |
| 987 | 3.62 | 0.194 | 6.33 |
| 988 | 2.52 | 0.198 | 9.5 |
| 989 | 2.27 | 0.103 | 3.92 |
| 990 | 2.47 | 0.115 | 5.78 |
| 991 | 3.03 | 0.119 | 3.91 |
| 992 | 10.8 | 0.165 | 7.86 |
| 993 | 20.8 | 0.138 | 17.6 |
| 994 | 9.51 | 0.359 | 4.42 |
| 995 | 3.18 | 0.118 | 27.7 |
| 996 | 14.9 | 0.2 | 98.1 |
| 997 | 5.01 | 0.373 | 20.7 |
| 998 | 8.96 | 0.0906 | 14.3 |
| 999 | 19.4 | 0.128 | 34.8 |
| 1000 | 4.62 | 0.176 | 3.55 |
| 1001 | 22.5 | 0.4 | 4.59 |
| 1002 | 1.89 | 0.119 | 9.09 |
| 1003 | 5.07 | 0.272 | 42.4 |
| 1004 | 2.67 | 0.519 | 9.34 |
| 1005 | 9.46 | 0.152 | 1.48 |
| 1006 | 4.28 | 0.109 | 5.12 |
| 1007 | 5.34 | 0.116 | 0.668 |
| 1008 | 7.47 | 0.14 | 1.09 |
| 1009 | 4.21 | 0.13 | 2.1 |
| 1010 | 4.5 | 0.159 | 2.89 |
| 1011 | 5.27 | 0.21 | 2.13 |
| 1012 | 4.36 | 0.206 | 1.81 |
| 1013 | 2 | 0.208 | 0.449 |
| 1014 | 3.62 | 0.0412 | 0.718 |
| 1015 | 3.53 | 0.0822 | 1.01 |
| 1016 | 5.57 | 0.218 | 1.55 |
| 1017 | 6.47 | 0.228 | 1.16 |
| 1018 | 5.29 | 0.51 | 1.69 |
| 1019 | 4.36 | 0.169 | 1.33 |
| 1020 | 5.87 | 0.309 | 2.29 |
| 1021 | 4.39 | 0.22 | 1.3 |
| 1022 | 6.93 | 0.35 | 3.28 |
| 1023 | 3.82 | 0.235 | 1.47 |
| 1024 | 10.6 | 0.441 | 4.79 |
| 1025 | 3.22 | 0.18 | 2.45 |
| 1026 | 6.32 | 0.308 | 1.77 |
| 1027 | 4.99 | 0.208 | 1.23 |
| 1028 | 5.77 | 0.189 | 1.34 |
| 1029 | 5.35 | 0.163 | 1.79 |
| 1030 | 9.42 | 0.122 | 1.72 |
| 1031 | 6.98 | 0.146 | 1.15 |
| 1032 | 5.94 | 0.204 | 1.19 |
| 1033 | 15.4 | 0.144 | 1.21 |
| 1034 | 12.3 | 0.214 | 2.49 |
| 1035 | 14.5 | 0.131 | 1.29 |
| 1036 | 2.05 | 0.114 | 6.87 |
| 1037 | 3.31 | 0.221 | 5.95 |
| 1038 | 5.93 | 0.134 | 1.45 |
| 1039 | 7.46 | 0.118 | 1.65 |
| 1040 | 11.1 | 0.0717 | 1.69 |
| 1041 | 7.71 | 0.365 | 1.24 |
| 1042 | 27.5 | 1.3 | 10.3 |
| 1043 | 17.1 | 0.282 | 1.52 |
| 1044 | 18.8 | 0.896 | 10.7 |
| 1045 | 7.35 | 0.781 | 1.51 |
| 1046 | 10 | 0.352 | 1.94 |
| 1047 | 8.18 | 0.28 | 16.2 |
| 1048 | 6.9 | 0.356 | 6.23 |
| 1049 | 6.33 | 0.24 | 2.23 |
| 1050 | 6.8 | 0.152 | 7.65 |
| 1051 | 10.3 | 0.172 | 8.3 |
| 1052 | 7.41 | 0.167 | 3.16 |
| 1053 | 10.4 | 0.123 | 6.2 |
| 1054 | 8.06 | 0.797 | 9.53 |
| 1055 | 1.88 | 0.366 | 14.6 |
| 1056 | 3.98 | 0.0929 | 4.25 |
| 1057 | 5.29 | 0.128 | 5.16 |
| 1058 | 5.8 | 0.139 | 4.48 |
| 1059 | 7.52 | 0.468 | 4.61 |
| 1060 | 9.08 | 0.223 | 2.85 |
| 1061 | 17.3 | 0.656 | 4.56 |
| 1062 | 8.77 | 0.726 | 7.75 |
| 1063 | 10.6 | 0.318 | 6.96 |
| 1064 | 13.7 | 0.556 | 7.89 |
| 1065 | 19.7 | 0.293 | 11.6 |
| 1066 | 25.4 | 0.446 | 9.8 |
| 1067 | 12.6 | 0.471 | 17.6 |
| 1068 | 4.8 | 0.211 | 11.6 |
| 1069 | 21.2 | 0.417 | 8.87 |
| 1070 | 20.2 | 0.167 | 1.54 |
| 1071 | 23.5 | 0.261 | 2.06 |
| 1072 | 10.5 | 0.157 | 0.889 |
| 1073 | 12.3 | 0.201 | 1.09 |
| 1074 | 22.8 | 0.0745 | 0.794 |
| 1075 | 25 | 0.0778 | 0.878 |
| 1076 | 59 | 0.174 | 1.47 |
| 1077 | 18.8 | 0.23 | 1.48 |
| 1078 | 7.58 | 0.356 | 1.62 |
| 1079 | 30 | 0.0923 | 1.22 |
| 1080 | 20.9 | 0.176 | 1.59 |
| 1081 | 19.7 | 0.105 | 1.29 |
| 1082 | 12.3 | 0.099 | 4.13 |
| 1083 | 15 | 0.328 | 7.76 |
| 1084 | 11.5 | 0.0975 | 10.3 |
| 1085 | 11.6 | 0.0827 | 1.28 |
| 1086 | 12 | 0.117 | 1.23 |
| 1087 | 15.4 | 0.207 | 2.63 |
| 1088 | 14.8 | 0.182 | 2.99 |
| 1089 | 14 | 0.213 | 2.96 |
| 1090 | 15.6 | 0.272 | 5.44 |
| 1091 | 4.67 | 0.0592 | 1.23 |
| 1092 | 3.45 | 0.0648 | 1.33 |
| 1093 | 7.72 | 0.152 | 0.954 |
| 1094 | 5.84 | 0.0515 | 0.623 |
| 1095 | 2.75 | 0.065 | 1.17 |
| 1096 | 3.94 | 0.0799 | 1.47 |
| 1097 | 6.16 | 0.136 | 1.59 |
| 1098 | 6.2 | 0.201 | 1.22 |
| 1099 | 3.47 | 0.076 | 0.73 |
| 1100 | 5.28 | 0.0694 | 0.514 |
| 1101 | 4.72 | 0.0592 | 1.75 |
| 1102 | 4.37 | 0.0418 | 2.18 |
| 1103 | 11.1 | 0.0723 | 1.06 |
| 1104 | 11.1 | 0.09 | 1.7 |
| 1105 | 10.7 | 0.0427 | 0.875 |
| 1106 | 7.71 | 0.0312 | 0.87 |
| 1107 | 5.66 | 0.0447 | 0.51 |
| 1108 | 4.96 | 0.0507 | 0.752 |
| 1109 | 10.8 | 0.0626 | 2.3 |
| 1110 | 5.91 | 0.059 | 0.508 |
| 1111 | 5.28 | 0.0356 | 1.14 |
| 1112 | 10.7 | 0.254 | 0.957 |
| 1113 | 14.4 | 0.0414 | 1.12 |
| 1114 | 11.5 | 0.0478 | 0.84 |
| 1115 | 12.7 | 0.0246 | 2 |
| 1116 | 8.2 | 0.134 | 4.63 |
| 1117 | 4.93 | 0.124 | 3.51 |
| 1118 | 6.52 | 0.128 | 5.42 |
| 1119 | 7.61 | 0.0939 | 3.57 |
| 1120 | 5.17 | 0.096 | 4.5 |
| 1121 | 8.83 | 0.115 | 5.23 |
| 1122 | 10.3 | 0.109 | 5.66 |
| 1123 | 5.53 | 0.101 | 4.47 |
| 1124 | 6.97 | 0.187 | 10.1 |
| 1125 | 5.83 | 0.173 | 8.26 |
| 1126 | 3.92 | 0.174 | 4.56 |
| 1127 | 5.95 | 0.167 | 6.16 |
| 1128 | 9.88 | 0.0378 | 0.486 |
| 1129 | 6.11 | 0.048 | 0.501 |
| 1130 | 13.3 | 0.0441 | 0.641 |
| 1131 | 8.42 | 0.0472 | 0.483 |
| 1132 | 2.11 | 0.0335 | 0.681 |
| 1133 | 2.95 | 0.0719 | 0.768 |
| 1134 | 2.57 | 0.0391 | 0.957 |
| 1135 | 1.76 | 0.0126 | 0.746 |
| 1136 | 1.26 | 0.0131 | 0.453 |
| 1137 | 14.2 | 0.0334 | 0.582 |
| 1138 | 1.01 | 0.0491 | 1.93 |
| 1139 | 5.29 | 0.0431 | 1.85 |
| 1140 | 1.56 | 0.00821 | 0.323 |
| 1141 | 1.15 | 0.00921 | 0.412 |
| 1142 | 1.34 | 0.00706 | 0.329 |
| 1143 | 1.42 | 0.0087 | 0.381 |
| 1144 | 1.32 | 0.00649 | 0.282 |
| 1145 | 1.07 | 0.00689 | 0.313 |
| 1146 | 1.22 | 0.00628 | 0.281 |
| 1147 | 1.17 | 0.00753 | 0.347 |
| 1148 | 1.6 | 0.00801 | 0.299 |
| 1149 | 1.37 | 0.00804 | 0.352 |
| 1150 | 1.17 | 0.0069 | 0.278 |
| 1151 | 1.31 | 0.00339 | 0.262 |
| 1152 | 2.32 | 0.0101 | 0.371 |
| 1153 | 2.69 | 0.0109 | 0.33 |
| 1154 | 6.42 | 0.00879 | 0.344 |
| 1155 | 1.83 | 0.00917 | 0.434 |
| 1156 | 2.94 | 0.0127 | 0.444 |
| 1157 | 2.04 | 0.0124 | 0.408 |
| 1158 | 2.19 | 0.0126 | 0.419 |
| 1159 | 1.86 | 0.0118 | 0.45 |
| 1160 | 2.41 | 0.00773 | 0.365 |
| 1161 | 2.19 | 0.00973 | 0.39 |
| 1162 | 2.55 | 0.00818 | 0.372 |
| 1163 | 1.75 | 0.00951 | 0.449 |
| 1164 | 2.83 | 0.0104 | 0.495 |
| 1165 | 2.68 | 0.0121 | 0.632 |
| 1166 | 2.94 | 0.00999 | 0.478 |
| 1167 | 2.16 | 0.011 | 0.636 |
| 1168 | 2.63 | 0.00839 | 0.422 |
| 1169 | 2.43 | 0.011 | 0.613 |
| 1170 | 2.43 | 0.00783 | 0.395 |
| 1171 | 2.19 | 0.00953 | 0.529 |
| 1172 | 2.52 | 0.00886 | 0.44 |
| 1173 | 2.31 | 0.00943 | 0.604 |
| 1174 | 2.58 | 0.00896 | 0.454 |
| 1175 | 2.08 | 0.00962 | 0.572 |
| 1176 | 1.8 | 0.00717 | 0.344 |
| 1177 | 4.23 | 0.0114 | 0.681 |
| 1178 | 3.08 | 0.00913 | 0.437 |
| 1179 | 2.87 | 0.0102 | 0.652 |
| 1180 | 3.16 | 0.00602 | 0.445 |
| 1181 | 3.34 | 0.0115 | 0.664 |
| 1182 | 1.24 | 0.0316 | 0.797 |
| 1183 | 1.38 | 0.0484 | 0.769 |
| 1184 | 1.5 | 0.071 | 1.18 |
| 1185 | 1.64 | 0.0266 | 0.762 |
| 1186 | 1.46 | 0.0404 | 0.594 |
| 1187 | 1.81 | 0.0648 | 1.06 |
| 1188 | 1.16 | 0.0914 | 1.01 |
| 1189 | 1.59 | 0.00597 | 0.292 |
| 1190 | 1.68 | 0.0109 | 0.765 |
| 1191 | 3.06 | 0.00992 | 0.945 |
| 1192 | 1.54 | 0.00924 | 0.499 |
| 1193 | 1.56 | 0.00897 | 0.544 |
| 1194 | 2.02 | 0.00725 | 0.51 |
| 1195 | 1.74 | 0.00708 | 0.367 |
| 1196 | 1.9 | 0.00756 | 0.418 |
| 1197 | 1.88 | 0.00666 | 0.407 |
| 1198 | 1.8 | 0.00663 | 0.475 |
| 1199 | 2.05 | 0.0076 | 0.5 |
| 1200 | 1.5 | 0.00883 | 0.727 |
| 1201 | 1.76 | 0.00959 | 0.888 |
| 1202 | 0.5 | 0.00635 | 0.237 |
| 1203 | 2.58 | 0.0774 | 0.292 |
| 1204 | 3.5 | 0.21 | 0.338 |
| 1205 | 3.33 | 0.152 | 0.523 |
| 1206 | 1.78 | 0.0671 | 0.352 |
| 1207 | 7.71 | 0.00647 | 0.299 |
| 1208 | 3.52 | 0.00907 | 0.526 |
| 1209 | 0.97 | 0.00819 | 0.41 |
| 1210 | 2.25 | 0.00704 | 0.375 |
| 1211 | 1.45 | 0.00592 | 0.276 |
| 1212 | 1.71 | 0.00702 | 0.357 |
| 1213 | 1.69 | 0.00721 | 0.423 |
| 1214 | 1.85 | 0.00851 | 0.55 |
| 1215 | 2.09 | 0.0106 | 0.668 |
| 1216 | 1.83 | 0.00921 | 0.65 |
| 1217 | 1.98 | 0.0101 | 0.751 |
| 1218 | 1.88 | 0.00839 | 0.58 |
| 1219 | 1.64 | 0.0101 | 0.624 |
| 1220 | 1.57 | 0.0099 | 0.674 |
| 1221 | 2.27 | 0.0111 | 0.839 |
| 1222 | 2.55 | 0.0858 | 0.346 |
| 1223 | 2.61 | 0.0916 | 0.337 |
| 1224 | 2.32 | 0.048 | 0.379 |
| 1225 | 2.45 | 0.0531 | 0.399 |
| 1226 | 1.65 | 0.00539 | 0.264 |
| 1227 | 1.99 | 0.00621 | 0.387 |
| 1228 | 1.98 | 0.0067 | 0.379 |
| 1229 | 2.47 | 0.0065 | 0.408 |
| 1230 | 64.7 | 0.022 | 1.19 |
| 1231 | 15.7 | 0.0146 | 1.23 |
| 1232 | 6.69 | 0.00893 | 0.723 |
| 1233 | 9.48 | 0.012 | 1.09 |
| 1234 | 11.6 | 0.0135 | 1.17 |
| 1235 | 455 | 0.241 | 25.3 |
| 1236 | 0.947 | 0.052 | 0.304 |

[0870] As seen in Table 3, exemplary analogs stimulate CAMP from human GIP. GLP-1 and glucagon receptors in the presence of 0.1% casein.

### In Vivo Studies

### Pharmacokinetics in Male Sprague Dawley Rats:

[0871] The pharmacokinetics of the exemplary analogs are evaluated following a single subcutaneous (SC) administration of 10 nmol/kg (dissolved in 40 mM Tris pH8) or single 4 mg/kg (mixed with 250 mM sodium decanoate/C₁₀ in 40 mM Tris pH8) intrajejunal (IJ) administration to male Sprague Dawley rats. Blood samples are collected over 96 hours following SC administration and 72 hours following IJ dosing, and resulting individual plasma concentrations are used to calculate pharmacokinetic parameters. Peptide plasma (K₃ EDTA) concentrations are determined using a qualified LC/MS method that measured the intact mass of the analog. Each peptide and an analog as an internal standard are extracted from rat plasma using methanol. A High Resolution Instrument was used for LC/MS detection. Mean pharmacokinetic parameters are shown in Tables 4 and 5.

TABLE 4
Mean Pharmacokinetic Parameters of Peptides
Following a Single Subcutaneous Administration
of 10 nmol/kg to Male Sprague Dawley Rats.

| | T_{1/2} (hr) | Cl/F (mL/hr/Kg) |
|---|---|---|
| Example 1 | 16.1 | 12.6 |
| Example 2 | 12.1 | 8.6 |
| Example 289 | 22.4 | 3.87 |
| Example 321 | 26.2 | 8.2 |
| Example 329 | 12.6 | 19.3 |

Abbreviations: T_{1/2} = half-life, CL/F = apparent clearance
NOTE:
Data are the mean, where n = 3/group.

TABLE 5
Mean Pharmacokinetic Parameters of Peptides Following a single
IJ Administration of 4 mg/kg to Male Sprague Dawley Rats.

| | Cmax/D | | |
|---|---|---|---|
| | (nM/mg/kg) | T_{1/2} (hr) | Cl/F (L/hr/Kg) |
| Example 368 | 80 | 9.6 | 0.44 |
| Example 369 | 70 | 8.2 | 0.68 |
| Example 378 | 151 | 8.2 | 0.23 |
| Example 381 | 60 | 8.3 | 0.59 |
| Example 387 | 43 | 9.2 | 0.84 |
| Example 401 | 36 | 6.6 | 0.98 |
| Example 429 | 52 | 7.8 | 0.64 |
| Example 462 | 78 | 11 | 0.6 |
| Example 463 | 35 | 8.3 | 0.97 |
| Example 472 | 90 | 9.4 | 0.44 |
| Example 475 | 105 | 13.7 | 0.21 |

Abbreviations: Cmax/D = dose normalized maximum plasma concentrations; T_{1/2} = half-life, CL/F = apparent clearance.
NOTE:
Data are the mean, where n = 4/group.

[0872] Results from this study for Examples tested are consistent with an extended pharmacokinetic profile.

### Pharmacokinetics in Cynomolgus Monkeys

[0873] A study is designed to evaluate the oral bioavailability of Example polypeptides in cynomolgus monkeys. High resolution liquid chromatography/mass spectrometry (HR-LC/MS) is used to measure the concentrations of Examples 510, 548, 558, 694, 699, 686 712, 741, 883, and 1027 in cynomolgus monkey plasma. Standards and controls are prepared in cynomolgus monkey plasma, and any dilutions required to bring samples into the quantitative range are also performed in control cynomolgus monkey plasma. To control assay variability, an internal standard (IS) is added to all the standards and samples. The Examples and IS are extracted from 100% monkey plasma (50 μL) by protein precipitation using isopropyl alcohol and methanol (50:50 v/v). The samples are then centrifuged (3000 rpm for 10 minutes) and the supernatant is transferred to a Siricco Protein Precipitation Plate. The samples are loaded on a Sep-Pak tC18 SPE microelution plate that is conditioned with 2% formic acid in acetonitrile and water. The compounds are then washed with 2% formic acid in water and eluted using 2% formic acid in acetonitrile into a plate containing 5× Invitrosol and 1% formic acid in water prior to injecting an aliquot (10 μL) on to Xselect CSH C18, 3.5 μm, 2.1×20 mm for LC/MS analysis.

[0874] The plasma pharmacokinetics (PK) of Examples 510, 548, 558, 694, 699, 686 712, 741, 883, and 1027 are evaluated in male and female cynomolgus monkeys following a single intravenous (IV) dose (10 nmol/kg). Blood samples are collected over 504 hours. Plasma is harvested from blood samples by centrifugation and stored frozen (−70° C.) until analysis. Plasma concentrations of the molecules are detected using the bioanalytical method described above.

TABLE 6
Pharmacokinetic Parameters (Mean ± SD) Following a Single IV Dose of
Example polypeptides (10 nmol/kg) to male and female Cynomolgus Monkeys (n = 3).

| | Dose | T_{1/2} | AUC_{0-inf} | CL |
|---|---|---|---|---|
| Compound | (nmol/kg) | (hr) | (hr*nmol/L) | (mL/kg/hr) |
| Example 883 | 10 | 62.8 ± 53.9 | 8690 ± 623 | 1.15 ± 0.083 |
| Example 510 | 10 | 55.9 ± 13.2 | 14500 ± 3420 | 0.716 ± 0.181 |
| Example 548 | 10 | 53.2 ± 0.603 | 10500 ± 1580 | 0.971 ± 0.159 |
| Example 558 | 10 | 107 ± 22.0 | 6230 ± 273 | 1.60 ± 0.071 |
| Example 1027 | 10 | 76.4 ± 31.4 | 8570 ± 1550 | 1.20 ± 0.239 |
| Example 741 | 10 | 32.1 ± 4.22 | 9550 ± 2280 | 1.09 ± 0.24 |
| Example 712 | 10 | 54.0 ± 6.09 | 12400 ± 862 | 0.81 ± 0.06 |
| Example 694 | 10 | 50.7 ± 16.8 | 10700 ± 2750 | 0.98 ± 0.26 |
| Example 699 | 10 | 50.8 ± 13.7 | 9230 ± 1640 | 1.11 ± 0.19 |
| Example 686 | 10 | 41.5 ± 2.35 | 7040 ± 1290 | 1.46 ± 0.29 |

Abbreviations: AUC_{0-inf} = area under the curve from time 0 hours to infinity; CL = clearance; T_{1/2} = half-life.

[0875] PK parameters of TG-2474, TG-2728, TG-2565, TG-2698, TG-2708, TG-3329, TG-3270, TG-3169, TG-3211, and TG-3120 are determined after a single 10 mg oral dose to male and female cynomolgus monkeys. Blood samples are collected up to 504 hours post-dose. Plasma is harvested from blood samples by centrifugation and stored frozen (−70° C.) until analysis. Plasma concentrations of the molecules are detected using the bioanalytical method described above.

TABLE 7
Pharmacokinetic Parameters (Mean ± SD) Following a Single Oral Dose of Example
polypeptides (10 mg per animal) with Sodium Salcaprozate ((N-[8-(2-hydroxybenzoyl)
amino] caprylate) (SNAC), 300 mg) to male and female Cynomolgus Monkeys (n = 4).

| | Dose | T_{1/2} | Tₘₐₓ | Cₘₐₓ | AUC_{0-inf} | CL/F | F |
|---|---|---|---|---|---|---|---|
| Compound | (nmol/kg) | (hr) | (hr) | (nmol/L) | (hr*nmol/L) | (mL/kg/hr) | (%) |
| Example | 519 ± | 29.0 ± | 2.0 ± | 43.6 ± | 1280 ± | 666 ± | 0.3 ± |
| 883 | 57 | 13.4 | 1.15 | 22.3 | 705 | 666 | 0.2 |
| Example | 535 ± | 47.0 ± | 2.0 ± | 126 ± | 5090 ± | 310 ± | 0.7 ± |
| 510 | 69 | 25.0 | 1.15 | 87.1 | 4290 | 419 | 0.6 |
| Example | 558 ± | 45.0 ± | 1.5 ± | 75.7 ± | 3580 ± | 162 ± | 0.6 ± |
| 548 | 77 | 11.9 | 1.0 | 6.19 | 817 | 37 | 0.1 |
| Example | 448 ± | 46.2 ± | 2.75 ± | 147 ± | 4990 ± | 124 ± | 1.8 ± |
| 558 | 20 | 8.01 | 2.36 | 86.9 | 2890 | 85 | 1.0 |
| Example | 504 ± | 55.7 ± | 2.5 ± | 135 ± | 5070 ± | 166 ± | 1.2 ± |
| 1027 | 53 | 25.4 | 1.0 | 93.1 | 4080 | 132 | 0.9 |
| Example | 564 ± | 58.1 ± | 3.75 ± | 95.8 ± | 4200 ± | 137 ± | 0.8 ± |
| 741 | 93 | 22.8 | 1.5 | 8.61 | 679 | 21.2 | 0.1 |
| Example | 563 ± | 51.8 | 3.75 ± | 124 ± | 6180 ± | 111 ± | 0.9 ± |
| 712 | 54 | 16.4 | 1.5 | 49.3 | 2670 | 62.9 | 0.4 |
| Example | 572 ± | 50.7 ± | 3.50 ± | 353 ± | 14800 ± | 52.4 ± | 2.4 ± |
| 694 | 59 | 13.3 | 2.89 | 192 | 10600 | 28.1 | 1.7 |
| Example | 575 ± | 34.3 ± | 2.75 ± | 187 ± | 7150 ± | 90.7 ± | 1.3 ± |
| 699 | 82 | 7.8 | 2.36 | 102 | 2890 | 35.6 | 0.5 |
| Example | 554 ± | 44.6 ± | 1.0 ± | 249 ± | 14200 ± | 176 ± | 3.6 ± |
| 686 | 54 | 6.49 | 0.0 | 319 | 22300 | 158 | 5.7 |

Abbreviations: AUC_{0-inf} = area under the curve from time 0 hours to infinity; CL/F = apparent clearance; Cₘₐₓ = maximum concentration; Tₘₐₓ = time to maximal concentration; T_{1/2} = half-life; F = bioavailability.

[0876] Percent F results in Table 7 demonstrate relative bioavailability of example polypeptides when administered orally as compared to IV administration.

### Studies in Diet-Induced Obese C₅₇BL/6 Mice:

[0877] To investigate the effect of the polypeptides as described herein on weight loss, exemplary polypeptides are dosed to C₅₇BL/6 diet-induced obese (DIO) mice.

[0878] Specifically, DIO male C₅₇BL/6 mice (Taconic, Germantown, NY) maintained on a calorie-rich diet are used in the following studies. Mice are individually housed in a temperature-controlled (24° C.) facility with 12-hour light/dark cycle (lights on 22:00) and free access to food (TD95217) and water. After a minimum of 2 weeks acclimation to the facility, the mice are randomized according to their body weight, so each experimental group of animals would have similar starting body weight. The body weights range from 41 to 50 g.

[0879] All groups contain 5 mice. Mice are treated with vehicle (40 mM Tris-HCl at pH 8.0), or example polypeptides at 10 nmol/kg. Treatments are administered by subcutaneous (SC) injection (10 mL/kg) to ad libitum fed DIO mice 30 to 90 minutes prior to the onset of the dark cycle either once daily (QD) or once every 3 days (Q3D) for 9-16 days. Body weight and food intake are measured daily throughout the study. Body weight is presented as percent of the starting weight. The vehicle-treated mice (control group) maintain their body weight ranging from 98.00±0.84% to 101.45±2.39% throughout the study.

[0880] Data are presented as mean±SEM of 5 animals per group in Table 7 below. Statistical analysis is performed using repeated measures ANOVA, followed by Dunnett's method comparison test.

TABLE 8
% Body Weight After Treatment with Exemplary polypeptides

| | Dosing | Duration | |
|---|---|---|---|
| Example | frequency | (days) | Body weight (%) |
| 2 | Q3D | 14 | 77.90 +/− 1.90**** |
| 4 | Q3D | 14 | 83.00 +/− 0.88**** |
| 21 | Q3D | 14 | 83.70 +/− 0.86**** |
| 23 | Q3D | 14 | 80.86 +/− 1.25**** |
| 24 | Q3D | 14 | 86.10 +/− 1.98**** |
| 29 | Q3D | 14 | 75.96 +/− 3.77**** |
| 30 | Q3D | 14 | 90.12 +/− 0.30** |
| 62 | Q3D | 14 | 88.05 +/− 1.08*** |
| 75 | Q3D | 14 | 96.28 +/− 1.51 |
| 93 | Q3D | 14 | 86.64 +/− 1.94**** |
| 94 | Q3D | 14 | 84.92 +/− 1.79**** |
| 98 | Q3D | 14 | 90.78 +/− 1.26* |
| 121 | Q3D | 14 | 85.58 +/− 3.20**** |
| 125 | Q3D | 14 | 97.90 +/− 0.32 |
| 126 | Q3D | 14 | 95.68 +/− 0.90 |
| 132 | Q3D | 14 | 98.66 +/− 0.47 |
| 134 | Q3D | 14 | 93.28 +/− 1.38 |
| 288 | Q3D | 14 | 86.18 ± 0.67**** |
| 289 | QD | 16 | 60.94 ± 1.87**** |
| 289 | Q3D | 14 | 82.32 ± 1.25**** |
| 290 | QD | 16 | 65.40 ± 3.45**** |
| 295 | QD | 16 | 51.58 ± 3.24**** |
| 296 | QD | 16 | 49.64 ± 1.97**** |
| 297 | QD | 16 | 48.42 ± 2.86**** |
| 315 | Q3D | 14 | 79.76 +/− 1.72**** |
| 321 | Q3D | 14 | 87.14 +/− 0.59*** |
| 334 | Q3D | 14 | 84.78 +/− 2.74**** |
| 339 | Q3D | 14 | 82.36 +/− 3.01**** |
| 368 | QD | 14 | 52.52 +/− 2.49**** |
| 369 | QD | 14 | 52.91 +/− 2.17**** |
| 378 | QD | 15 | 68.84 +/− 1.37**** |
| 401 | QD | 15 | 71.54 ± 3.32**** |
| 429 | QD | 15 | 70.20 ± 1.63**** |
| 429 | QD | 9 | 74.66 ± 3.87**** |
| 452 | QD | 15 | 74.13 ± 4.11**** |
| 462 | QD | 9 | 73.68 ± 2.82**** |
| 463 | QD | 9 | 83.31 ± 2.10**** |
| 472 | QD | 9 | 76.13 ± 2.28**** |
| 475 | QD | 9 | 69.34 ± 2.99**** |
| 490 | QD | 9 | 80.75 ± 3.23**** |
| 686 | QD | 14 | 72.73 ± 3.65**** |
| 694 | QD | 7 | 71.92 ± 1.28**** |
| 694 | QD | 14 | 69.77 ± 2.96**** |
| 699 | QD | 7 | 68.34 ± 0.85**** |
| 699 | QD | 14 | 56.85 ± 2.42**** |
| 700 | QD | 7 | 75.9 ± 3.77**** |
| 712 | QD | 7 | 69.4 ± 0.60**** |
| 712 | QD | 14 | 63.61 ± 3.73**** |
| 741 | QD | 14 | 59.42 ± 2.94**** |

*p < 0.05;
**p < 0.01;
***p < 0.001;
****p < 0.0001 compared to Control group,
One way ANOVA,
Dunnett's multiple comparison test

### GLP1-R Internalization Assay

[0881] The potency of peptides to stimulate ligand-induced internalization of the GLP-1R is determined using HEK293 cells expressing the human GLP1-R.

[0882] HEK293 cells were seeded in white, 384-well plates the day before transfection at a density of 20,000 cells/well. The cells were transfected with Lipofectamine 2000 (Invitrogen) for SNAP-GLP-1R. The following day, the media was removed and the tagged receptors were labeled with 100 nM Tag-Lite SNAP-Lumi4-Tb (donor, Cisbio), in OptiMEM for 75 minutes at 37° C. Afterward, the cells were washed with internalization buffer (HBBS supplemented with 1 mM CaCl2, 2.5 mM MgCl₂, 20 mM HEPES, and 0.1% Pluronic F-68, pH 7.4) followed by addition of 100 μM preheated fluorescein-O′-acetic acid (acceptor, Sigma-Aldrich). The plate was placed in a 37° C. incubator for 5 minutes prior to ligand addition to adjust the temperature. Then, the cells were stimulated with 37° C. preheated ligand, and internalization of GLP1-R was measured every 3 minutes for 60 minutes at 37° C. by an EnVision plate reader. Data were normalized to maximum concentration of GLP-1 (100%) and no ligand (0%) and plotted using GraphPad Prism 7 software.

[0883] The potency of an exemplary polypeptide to stimulate ligand-induced internalization of the GLP-1R is reported in Table 9. Assay results identify whether a polypeptide is a partial agonist on the GLP-1R with respect to GLP-1R intemalization.

TABLE 9

| | GLP1R | |
|---|---|---|
| Compound or | Internalization | Internalization |
| Example Tested | EC₅₀, nM | % TOP |
| GLP1 7-36 amide | 7.17 | 99.4 |
| Semaglutide | 12.4 | 103 |
| Tirzepatide | 60.8 | 60.3 |
| 1 | 44.7 | 69.1 |
| 2 | 49.5 | 66.8 |
| 3 | 49.2 | 69.7 |
| 4 | 49.1 | 67.8 |
| 5 | 53.4 | 75 |
| 7 | 52.6 | 76.3 |
| 8 | 63.2 | 74 |
| 10 | 79.2 | 71.9 |
| 11 | 75.1 | 73.8 |
| 12 | 48.5 | 75.3 |
| 13 | 53.3 | 74.7 |
| 15 | 79 | 74.9 |
| 16 | 37.8 | 74.6 |
| 17 | 66.2 | 72.2 |
| 18 | 91.8 | 74.1 |
| 19 | 52.4 | 72.6 |
| 21 | 87.6 | 72.5 |
| 22 | 41.9 | 64.7 |
| 23 | 51.5 | 67.2 |
| 24 | 79.9 | 71.9 |
| 26 | 96.1 | 75.6 |
| 28 | 81.8 | 76.2 |
| 29 | 129 | 57 |
| 30 | 70.4 | 72.8 |
| 31 | 91.9 | 67.4 |
| 32 | 86.1 | 64.4 |
| 33 | 106 | 64.6 |
| 37 | 51.6 | 68.3 |
| 41 | 83.7 | 62.3 |
| 42 | 61.4 | 58.3 |
| 43 | 58.2 | 68.3 |
| 44 | 51.5 | 65 |
| 45 | 52.6 | 62.1 |
| 46 | 41 | 58.1 |
| 48 | 44 | 55.2 |
| 49 | 37.2 | 53.2 |
| 50 | 30.1 | 31.1 |
| 51 | 89.2 | 55.7 |
| 55 | 79.5 | 70.7 |
| 57 | 76.6 | 73.1 |
| 58 | 56.2 | 78.1 |
| 62 | 40.3 | 44.9 |
| 66 | 42.1 | 46.3 |
| 67 | 50.9 | 31.1 |
| 68 | 95.2 | 33.8 |
| 69 | 71.9 | 58.2 |
| 70 | 60 | 61.3 |
| 71 | 58.8 | 68.6 |
| 74 | 72.7 | 53.3 |
| 75 | 61.8 | 51.9 |
| 78 | 78.2 | 55 |
| 79 | 56.6 | 45.3 |
| 80 | 35.8 | 48.2 |
| 85 | 326 | 48.3 |
| 86 | 57.8 | 52.5 |
| 87 | 61.8 | 45.4 |
| 90 | 70.8 | 49.8 |
| 93 | 30.4 | 50.8 |
| 94 | 37.1 | 47.2 |
| 95 | 37.8 | 49.3 |
| 97 | 51.9 | 50.7 |
| 98 | 56 | 49.3 |
| 99 | 56.9 | 46.1 |
| 107 | 150 | 45.1 |
| 108 | 67.7 | 41.1 |
| 109 | 28.8 | 39 |
| 110 | 28.3 | 42.5 |
| 111 | 49.1 | 46.4 |
| 112 | 30.1 | 59.1 |
| 113 | 39.5 | 64.6 |
| 114 | 47.2 | 62.9 |
| 115 | 255 | 56.5 |
| 116 | 80.7 | 46.2 |
| 117 | 45.5 | 51 |
| 118 | 82.3 | 46.4 |
| 119 | 73.5 | 43.4 |
| 121 | 38.1 | 46.3 |
| 122 | 57.4 | 43.7 |
| 125 | 86.4 | 42.6 |
| 126 | 63.2 | 38.8 |
| 129 | 22.5 | 40.6 |
| 132 | 72.7 | 67.2 |
| 134 | 67.9 | 22.3 |
| 136 | 36.1 | 37.8 |
| 137 | 60.2 | 47.7 |
| 139 | 62.8 | 39.9 |
| 141 | 95.3 | 64.1 |
| 143 | 337 | 43 |
| 148 | 95.5 | 37.4 |
| 151 | 77.8 | 55 |
| 154 | 47.7 | 65.9 |
| 155 | 85.1 | 54.5 |
| 157 | 60.3 | 53.3 |
| 158 | 104 | 52.4 |
| 162 | 48.8 | 44.8 |
| 163 | 143 | 37.8 |
| 164 | 45.9 | 46.5 |
| 165 | 57.5 | 44.5 |
| 166 | 74.6 | 44.2 |
| 167 | 75.9 | 44.7 |
| 168 | 74.8 | 38.7 |
| 169 | 178 | 49.4 |
| 171 | 61.4 | 36.1 |
| 172 | 121 | 41.4 |
| 173 | 97.1 | 38.6 |
| 174 | 123 | 52.8 |
| 175 | 116 | 49.2 |
| 176 | 103 | 48 |
| 177 | 79.4 | 44 |
| 179 | 63.4 | 48.4 |
| 181 | 116 | 47.5 |
| 183 | 100 | 45.4 |
| 185 | 144 | 43.7 |
| 186 | 124 | 41.1 |
| 187 | 17.2 | 57 |
| 188 | 44.7 | 40.2 |
| 189 | 103 | 45.8 |
| 192 | 115 | 48.7 |
| 193 | 132 | 50.7 |
| 200 | 86.1 | 39.2 |
| 204 | 66.4 | 45.5 |
| 205 | 49.4 | 67.7 |
| 208 | 55.7 | 49.6 |
| 209 | 83.1 | 41.2 |
| 210 | 80.2 | 49.2 |
| 211 | 57.4 | 26.9 |
| 212 | 79.7 | 43 |
| 213 | 85.9 | 45.2 |
| 214 | 50.1 | 41.7 |
| 217 | 27.6 | 58.2 |
| 218 | 80.5 | 35 |
| 219 | 48 | 37.2 |
| 222 | 34.6 | 52.4 |
| 223 | 45.8 | 59.3 |
| 224 | 32.2 | 61.9 |
| 225 | 26 | 56.7 |
| 226 | 29.1 | 59.3 |
| 227 | 114 | 59.4 |
| 228 | 39 | 35 |
| 229 | 42.4 | 31.4 |
| 230 | 34.4 | 31.2 |
| 231 | 36.1 | 27.7 |
| 232 | 44.7 | 45.5 |
| 233 | 24.8 | 41.8 |
| 238 | 32.1 | 38.2 |
| 239 | 72.6 | 42.9 |
| 241 | 64.4 | 37.6 |
| 242 | 56 | 38.2 |
| 248 | 67.4 | 39.5 |
| 249 | 86.2 | 34.8 |
| 250 | 97 | 45 |
| 253 | 81.6 | 55.2 |
| 254 | 31.9 | 47.8 |
| 255 | 47.1 | 51.8 |
| 256 | 87.8 | 43.5 |
| 276 | 237 | 68.4 |
| 278 | 251 | 68.6 |
| 279 | 115 | 37.5 |
| 280 | 39.4 | 74.9 |
| 282 | 28.7 | 71.9 |
| 285 | 59.9 | 73.6 |
| 288 | 30.3 | 72.4 |
| 289 | 10.9 | 86.5 |
| 295 | 31.4 | 88.4 |
| 296 | 19.2 | 87.2 |
| 321 | 27.1 | 92.8 |
| 323 | 28.2 | 84.8 |
| 329 | 34 | 91.1 |
| 334 | 28.3 | 96.8 |
| 358 | 21.5 | 83.1 |
| 359 | 49.6 | 74.4 |
| 360 | 214 | 66.1 |
| 361 | 50.4 | 73 |
| 362 | 22.8 | 77.5 |
| 510 | 11.8 | 113 |
| 548 | 17.8 | 109 |
| 558 | 8.14 | 116 |
| 686 | 33.2 | 101 |
| 694 | 21.8 | 97.3 |
| 699 | 14.9 | 102 |
| 712 | 35.3 | 109 |
| 741 | 50.1 | 103 |
| 883 | 23.9 | 77.1 |
| 1026 | 47.4 | 80 |

### GLP-1R CHO Cell β-Arrestin Recruitment Assay

[0884] Activated G-protein coupled receptors can interact with the β-arrestin family of signaling proteins. The potency of peptides for GLP-1R induced arrestin recruitment is determined using the PathHunter Enzyme Fragment Complementation approach substantially as described (von Degenfeld et al., FASEB J., 2007 (14):3819-26 and Hamdouchi et al., J. Med Chem., 2016 59(24): 10891-10916).

[0885] CHO-KI cells expressing Pro-Link-tagged Human GLP-1R and enzyme-acceptor-tagged β-arrestin-2 may be obtained from DiscoveRx and prepared as assay-ready frozen cells. Test peptides are solubilized in DMSO and serial dilutions are performed using the Echo acoustic dispenser (LabCyte). Assay media is the PathHunter Cell Assay Buffer (DiscoveRx) containing 0.1% w/v hydrolyzed Casein (Sigma). 100 nl of peptide is dispensed into 10 μl of assay media in a 384 well plate and then 10 μl of cells in assay media are added to give 5000 cells per well. Plates are incubated for 90 minutes in a 37′C/5% C0₂ incubator and 10 μl of PathHunter detection reagent is added (DiscoveRx) and plates are incubated at room temperature for 60 minutes. Luminescence signal is measured. Peptide concentration-response curves fit to a four-parameter logistic model to calculate potency as an EC₅₀. Data normalization to % stimulation is performed using DMSO and GLP-1(7-36) as minimum and maximum controls (Campbell et al., Assay Guidance Manual 2017).

[0886] The potency of a sample peptide to stimulate GLP-1R induced ß-arrestin recruitment is reported in Table 10. The assay results identify whether a peptide is a partial and biased agonist on the GLP-1R with respect to ß-arrestin-2 recruitment.

TABLE 10

| Compound or | hGLP1R | |
|---|---|---|
| Example | β-arrestin Rel | % Stimulation |
| Tested | EC₅₀, μM | Max |
| hGLP-1 7- | 0.00223 | 102 |
| 36 amide | | |
| Semaglutide | 0.00468 | 99.6 |
| Tirzepatide | >10 | 10.5 |
| 1 | >10 | 17.3 |
| 2 | >10 | 12.3 |
| 3 | >10 | 16.5 |
| 4 | 0.0232 | 15.8 |
| 5 | >10 | 18.4 |
| 288 | 0.0163 | 18 |
| 289 | 0.00596 | 47.5 |
| 294 | 0.0277 | 35.3 |
| 293 | 0.0119 | 54.6 |
| 290 | 0.00394 | 83.5 |
| 295 | 0.0164 | 44.1 |
| 296 | 0.014 | 55.2 |
| 297 | 0.0602 | 33.5 |
| 298 | 0.00329 | 86.4 |
| 300 | 0.0157 | 40.3 |
| 302 | 0.0112 | 56.6 |
| 304 | 0.00921 | 47.8 |
| 301 | 0.0132 | 59.1 |
| 307 | 0.00986 | 70.8 |
| 305 | 0.0233 | 58.3 |
| 311 | 0.0192 | 39.6 |
| 308 | 0.0169 | 41.4 |
| 309 | 0.00672 | 47.2 |
| 315 | 0.00376 | 29.7 |
| 321 | 0.00878 | 90.1 |
| 323 | 0.0108 | 44 |
| 329 | 0.00611 | 74.5 |

### Cell Based In Vitro Permeability (Papp) Assay

[0887] Intestinal organoid from Göttingen minipig jejunum tissue and its 2D monolayer are generated using the protocol previously described (van der Hee, B.; Loonen, L. M. P.;

[0888] Taverne, N.; Taverne-Thiele, J. J.; Smidt, H.; Wells, J. M., Optimized procedures for generating an enhanced, near physiological 2D culture system from porcine intestinal organoids. Stem Cell Res 2018, 28, 165-171). After 7 days of culture, organoids are dissociated into single cells by TrypLE (GIbco), and the single cell suspension is added in 24-well transparent transwell inserts (0.3 cm², Falcon, BD). When the transepithelial electrical resistance reached >600 52·cm², the peptide permeability is examined in the presence of 10 or 20 mM C10. Samples from the basal compartment are collected at 20 min in the presence of C10. Peptide concentrations in the apical and basal compartments are measured by LC/MS, and the apparent permeability coefficient (Papp) is calculated as previously described (Twarog, C.; Liu, K.; O'Brien, P. J.; Dawson, K. A.; Fattal, E.; Illel, B.; Brayden, D. J., A head-to-head Caco-2 assay comparison of the mechanisms of action of the intestinal permeation enhancers: SNAC and sodium caprate (C10). Eur J Pharm Biopharm 2020, 152, 95-107).

[0889] The Papp values for exemplary polypeptides are reported in Table 11.

TABLE 11

| Compound or | Relative Papp (Compared to internal standard) | |
|---|---|---|
| Example Tested | with 10 mM C10 | with 20 mM C10 |
| Semaglutide | 0.35 | |
| Amycretin | 0.18 | 0.22 |
| Example 406 | 0.90 | 0.59 |
| Example 475 | 0.79 | 0.73 |
| Example 62 | | 0.03 |
| Example 94 | | 0.02 |
| Example 119 | 0.15 | |
| Example 121 | 0.08 | |
| Example 130 | | 0.06 |
| Example 134 | 0.07 | |
| Example 135 | 0.04 | |
| Example 137 | 0.04 | |
| Example 361 | 0.10 | |
| Example 154 | 0.12 | |
| Example 155 | 0.07 | |
| Example 165 | 0.09 | |
| Example 169 | 0.12 | |
| Example 174 | 0.12 | |
| Example 182 | 0.12 | |
| Example 184 | 0.09 | |
| Example 186 | 0.10 | |
| Example 187 | 0.48 | |
| Example 188 | 0.46 | |
| Example 189 | 0.17 | |
| Example 193 | 0.17 | |
| Example 198 | 0.12 | |
| Example 204 | 0.16 | |
| Example 208 | 0.29 | |
| Example 209 | 0.08 | |
| Example 210 | 0.06 | |
| Example 211 | 0.06 | |
| Example 212 | 0.22 | |
| Example 213 | 0.26 | |
| Example 214 | 0.07 | |
| Example 223 | 0.29 | |
| Example 224 | 0.35 | |
| Example 225 | 0.48 | |
| Example 226 | 0.36 | |
| Example 227 | 0.42 | |
| Example 231 | 0.06 | |
| Example 232 | 0.13 | |
| Example 233 | 0.21 | |
| Example 238 | 0.06 | |
| Example 241 | 0.10 | |
| Example 242 | 0.07 | |
| Example 249 | 0.04 | |
| Example 250 | 0.11 | |
| Example 255 | 0.23 | |
| Example 784 | | 0.16 |
| Example 808 | | 0.29 |
| Example 552 | | 0.53 |
| Example 1033 | | 0.14 |
| Example 595 | | 0.55 |
| Example 666 | | 0.85 |
| Example 670 | | 0.46 |
| Example 673 | | 0.59 |
| Example 675 | | 0.36 |
| Example 686 | | 0.60 |
| Example 694 | | 0.60 |
| Example 696 | | 0.77 |
| Example 699 | | 0.51 |
| Example 700 | | 0.29 |
| Example 710 | | 0.35 |
| Example 712 | | 0.60 |
| Example 737 | | 0.69 |
| Example 741 | | 0.73 |
| Example 743 | | 0.56 |
| Example 761 | | 0.53 |

### In Vivo Ileum (Distal Loop) Absorption Assay

[0890] Ileum absorption of the exemplary polypeptides in the presence of C₁₀ in rats is evaluated using a previously reported intestinal closed loop model (Lawrence, S. A.; Blankenship, R.; Brown, R.; Estwick, S.; Ellis, B.; Thangaraju, A.; Datta-Mannan, A., Influence of FcRn binding properties on the gastrointestinal absorption and exposure profile of Fc molecules. Bioorg Med Chem 2021, 32, 115942).

[0891] Overnight fasted Sprague Dawley rats with body weights between 250-280 grams are anesthetized by inhaling isoflurane and placed on a warm surgical table maintained by circulating water at 37ºC. The surgical area is shaved, and the skin is disinfected with betadine scrub followed by 70% isopropyl alcohol. An approximately 2 cm ventral midline incision is made to expose intestine, and 10 cm of an ileum segment is tied off. The peptides are formulated with 100 mM C₁₀ in Tris buffer (pH 8.0, 50 mM) at a final concentration of 300 μM. The formulations are administered directly into the ileum loop. Blood samples (0.2 mL) are collected from tail vein before peptide dosing and 10, 20, 40, 60 minutes post dosing. Blood samples are collected into tubes containing KsEDTA (5%) and processed to plasma for subsequent analyses. Peptide concentrations in the plasma are determined by LC/MS.

TABLE 12

| | | 10 min IL | 20 min IL | 40 min IL | 60 min IL |
|---|---|---|---|---|---|
| | 0-1 h IL | plasma | plasma | plasma | plasma |
| Example | AUC, | concentration, | concentration, | concentration, | concentration, |
| No. | nM*hr | nM | nM | nM | nM |
| 62 | 9078 | 116 | 169 | 200 | 197 |
| 93 | 11118 | 143 | 188 | 242 | 274 |
| 94 | 9441 | 106 | 164 | 212 | 220 |
| 121 | 23626 | 247 | 359 | 498 | 704 |
| 125 | 6772 | 102 | 125 | 148 | 143 |
| 126 | 14074 | 162 | 256 | 299 | 344 |
| 129 | 11525 | 151 | 191 | 262 | 267 |
| 130 | 5339 | 67 | 93 | 116 | 128 |
| 132 | 17358 | 214 | 270 | 410 | 403 |
| 134 | 15907 | 207 | 287 | 355 | 346 |
| 151 | 5314 | 69 | 95 | 115 | 124 |
| 183 | 21763 | 241 | 372 | 471 | 556 |
| 204 | 24673 | 235 | 399 | 551 | 650 |
| 213 | 16102 | 175 | 258 | 362 | 412 |
| 224 | 15934 | 237 | 311 | 331 | 346 |
| 226 | 26272 | 333 | 454 | 618 | 545 |
| 227 | 35445 | 513 | 656 | 779 | 746 |
| 232 | 12128 | 186 | 235 | 255 | 256 |

### Proteolytic Stability

[0892] A pepsin stability assay is utilized to determine the relative stability of Example polypeptides in a simulated gastric proteolytic environment. Pepsin A is dissolved in simulated gastric fluid (SGF) with Example polypeptides or comparators and the solution is sampled and quenched at TO, 15, 30, and 60 minutes. Comparators are semaglutide and example compound number 4 from US Patent Application 2020/0024322 (“Cmpd 4”). The relative amount of intact peptide is quantified by mass spectrometry (MS).

[0893] Proteolytic stability of example polypeptides relative to comparators was performed in simulated gastric fluid (SGF 2 g/L NaCl, pH 1.2). The examples were dissolved in 50 mM Tris buffer pH 8.0 at a concentration of 10 mg/mL as a stock solution. Pepsin A was reconstituted in SGF at 10 mg/mL. A reaction was prepared by diluting peptide in SGF and spiking in the Pepsin A to have final concentration of example polypeptide at 0.4 mg/mL and 1 mg/mL of pepsin. The example peptide and pepsin solutions were then incubated at 37° C. in a shaking incubator set at 100 rpm. Samples (25 μL) were withdrawn at different time intervals and quenched with 100 mM ammonium bicarbonate pH 9 (50 μL) to stop proteolytic activity. All samples were centrifuged, and the supernatants were analyzed by LC/MS to determine the remaining intact peptide.

[0894] Results are provided in Tables 12-14 below:

TABLE 12
Stability in 0.1 mg/mL pepsin A solution.

| | % Intact (SD) | | | |
|---|---|---|---|---|
| Test Article | 0 min | 15 min | 30 min | 60 min |
| Cmpd 4 | 100 (0) | 101.9 (8.7) | 96.0 (12.1) | 107.9 (25.5) |
| Example 677 | 100 (0) | 90.8 (9.6) | 91.3 (3.0) | 102.7 (11.1) |
| Example 685 | 100 (0) | 85.1 (7.6) | 95.2 (11.6) | 94.6 (6.7) |
| Example 686 | 100 (0) | 99.2 (18.5) | 103.8 (26.2) | 103.8 (24.5) |
| Example 688 | 100 (0) | 97.6 (10.0) | 95.6 (6.1) | 89.9 (8.8) |
| Example 694 | 100 (0) | 100.9 (8.6) | 101.1 (8.0) | 113.4 (6.4) |
| Example 696 | 100 (0) | 101.9 (9.3) | 106.6 (5.8) | 116.9 (2.2) |
| Example 699 | 100 (0) | 121.4 (0.8) | 115.6 (7.5) | 111.9 (5.3) |
| Example 711 | 100 (0) | 95.0 (12.3) | 91.6 (18.0) | 91.9 (13.8) |
| Example 712 | 100 (0) | 92.4 (7.0) | 91.4 (1.3) | 93.5 (6.2) |
| Example 714 | 100 (0) | 99.2 (10.8) | 102.5 (10.2) | 96.9 (5.5) |
| Example 718 | 100 (0) | 102.7 (3.9) | 101.2(11.1) | 112.5(16.9) |
| Example 733 | 100 (0) | 108.8(10.6) | 106.6 (6.9) | 129.5(12.8) |
| Example 741 | 100 (0) | 132.4(49.9) | 103.9 (6.6) | 105.2 (9.3) |
| Example 742 | 100 (0) | 100.5(10.1) | 112.6 (17.9) | 103.3(13.8) |
| Example 700 | 100 (0) | 89.9 (17.8) | 105.5 (7.6) | 98.9 (20.3) |

TABLE 13
Stability in 1 mg/mL pepsin A solution.

| | % Intact (SD) | | | |
|---|---|---|---|---|
| Test Article | 0 min | 15 min | 30 min | 60 min |
| Cmpd 4 | 100 (0) | 78.2 (8.7) | 50.9 (1.6) | 26.2 (0.8) |
| Example 677 | 100 (0) | 58.3 (6.9) | 39.2 (4.7) | 15.5 (2.0) |
| Example 685 | 100 (0) | 59.9 (7.2) | 39.7 (1.6) | 15.0 (0.8) |
| Example 686 | 100 (0) | 66.27 (3.7) | 37.3 (4.4) | 18.1 (6.7) |
| Example 688 | 100 (0) | 67.9 (3.5) | 42.4 (1.6) | 17.9 (1.3) |
| Example 694 | 100 (0) | 87.9 (4.1) | 77.8 (1.5) | 76.9 (3.1) |
| Example 696 | 100 (0) | 91.0 (4.5) | 91.1 (2.5) | 77.6 (5.5) |
| Example 699 | 100 (0) | 97.9 (4.2) | 91.8 (6.2) | 83.9 (6.1) |
| Example 711 | 100 (0) | 98.8 (6.7) | 97.2 (6.2) | 89.7 (8.6) |
| Example 712 | 100 (0) | 104.2 (6.2) | 103.7 (7.1) | 91.6 (5.2) |
| Example 714 | 100 (0) | 106.5 (18.8) | 111.9(8.1) | 79.7 (3) |
| Example 718 | 100 (0) | 108.6 (5.0) | 95.9 (2.2) | 80.6 (3.9) |
| Example 733 | 100 (0) | 97.3 (20.1) | 118.9 (17.8) | 109.5 (23.3) |
| Example 741 | 100 (0) | 111.3 (9.4) | 100.0(18.1) | 113.7 (14.7) |
| Example 742 | 100 (0) | 87.5 (5.9) | 98.0 (10.1) | 101.7 (10.7) |
| Example 700 | 100 (0) | 95.8 (13.0) | 102.5 (30.0) | 115.2 (24.7) |

TABLE 14
Stability in 1 mg/mL pepsin A solution.

| | % Intact (SD) | | | |
|---|---|---|---|---|
| Test Article | 0 min | 15 min | 30 min | 60 min |
| Cmpd 4 | 100 (0) | 61.7 (5.2) | 70.2 (1.8) | 55.9 (7.4) |
| Semaglutide | 100 (0) | 0 (0) | 0 (0) | 0 (0) |
| Example 403 | 100 (0) | 155.4 (70.4) | 143.3 (48.0) | 365.6 (353.2) |
| Example 457 | 100 (0) | 78.8 (6.0) | 68.9 (48.0) | 60.1 (3.5) |
| Example 499 | 100 (0) | 117.4 (8.8) | 118.1 (3.8) | 115.0(8.5) |
| Example 500 | 100 (0) | 10.6 (1.2) | 1.0 (0.1) | 0 (0) |
| Example 505 | 100 (0) | 91.6 (1.2) | 78.9 (1.4) | 53.5 (2.2) |
| Example 1235 | 100 (0) | 1.4 (0.1) | 0 (0) | 0 (0) |

[0895] The data in Tables 12-14 support improvements in stability for certain Example polypeptides.

### Sequences

SEQ ID NO: 1 - Human GIP amide
YAEGTFISDYSIAMDKIHQQDFVNWLLAQKGKKNDWKHNITQ-NH₂
SEQ ID NO: 2 - Human GLP-1 (7-36) amide
HAEGTFTSDVSSYLEGQAAKEFIAWLVKGR-NH₂
SEQ ID NO: 3 - Human glucagon
HSQGTFTSDYSKYLDSRRAQDFVQWLMNT

[0897] SEO ID NO:4—Polypeptide of Formula I
[0898] SEQ ID NO:5—Polypeptide of Formula II
[0899] SEQ ID NO:6—Polypeptide of Formula III
[0900] SEQ ID NO:7-1242—Polypeptides of Examples 1-1236
[0901] SEQ ID NO: 1243—Polypeptide of Formula I′
[0902] SEQ ID NO: 1244—Polypeptide of Formula II′
[0903] SEQ ID NO: 1245—Polypeptide of Formula III′

The invention claimed is:

1. A polypeptide comprising:
X₁X₂QX₄LTX₆TSDX₁₀X₁₁X₁₂X₁₃LX₁₅X₁₆X₁₇AX₁₉X₂₀X₂₁FX₂₃
X₂₄X₂₅LX₂₇X₂₈X₂₉GX₃₁X₃₂SX₃₄X₃₅PX₃₇PX₃₉X₄₀X₄₁X₄₂X₄₃
X₄₄X₄₅X₄₆,
wherein
X₁ is Y, NMeY or H,
X₂ is Aib,
X₄ is G or D-Ala,
X₆ is F, αMeF or αMeF(2F),
X₁₀ is F, 3-Pal, 4-Pal, F(4CN), F(4NO₂) or Y,
X₁₁ is S or αMeS,
X₁₂ is Orn, K, R, Q, Dap, S, E or I,
X₁₃ is αMeL, I or L,
X₁₅ is D or E,
X₁₆ is K, Orn, A or E,
X₁₇ is any amino acid with a functional group available for conjugation to a fatty acid, A, I or Q or Orn,
X₁₉ is A or Q,
X₂₀ is any amino acid with a functional group available for conjugation to a fatty acid, Aib, Q, R or αMe-4-Pal,
X₂₁ is A, Aad, Aib, S, N, Q, E, T or Orn,
X₂₃ is I or V,
X₂₄ is any amino acid with a functional group available for conjugation to a fatty acid E, D-Glu, Q, N or D-Gln,
X₂₅ is W, Y, F, 4-Pal, αMeY or αMe-4-Pal,
X₂₇ is L, I, E, V, A, Aad, T, Q or S,
X₂₈ is any amino acid with a functional group available for conjugation to a fatty acid, E or A,
X₂₉ is G, Aib, T, D-Ala or A,
X₃₁ is P or E,
X₃₂ is S or P
X₃₄ is G or Aib,
X₃₅ is A, D or E,
X₃₇ is P or E,
X₃₉ is E, S, G, A, T or Orn,
X₄₀ is absent or G, E, S, A or T,
wherein if X₄₀ is G, E, S, A, T or D-Glu, then X₄₁ is absent or is E, S, D, G, Q, T, A, γE or D-Glu,
wherein if X₄₁ is E, S, D, G, Q, T, A, γE or D-Glu, then X₄₂ is absent or G, E, D-Glu, or γE,
wherein if X₄₂ is G, E, D-Glu or γE, then X₄₃ is absent or E, γE, or D-Glu,
wherein if X₄₃ is E, γE, or D-Glu, then X₄₄ is absent or E,
wherein if X₄₄ is E then X₄₅ is absent or E,
wherein if X₄₅ is E then X₄₆ is absent or E,
wherein if X₄₀ is absent, then X₄₁ through X₄₆ are also absent,
wherein if X₄₁ is absent, then X₄₂, through X₄₆ are also absent,
wherein if X₄₂ is absent, then X₄₃ through X₄₆ are also absent,
wherein if X₄₃ is absent, then X₄₄ through X₄₆ are also absent,
wherein if X₄₄ is absent, then X₄₅ and X₄₆ are also absent,
wherein if X₄₅ is absent then X₄₆ is also absent,
wherein the polypeptide comprises at least one of the following: X₆ is αMeF or αMeF(2F); X₁₀ is F, 3-Pal, 4-Pal, F(4CN) or F(4NO₂); X₁₁ is αMeS; X₁₃ is αMeL; X₂₄ is D-Glu; and/or X₂₅ is αMeY;
wherein if X₁₀ is F, 3-Pal, 4-Pal, F(4CN), or F(4NO₂), then X₁₂ is I,
and wherein at least one of X₁₇, X₂₀, X₂₄ or X₂₈ is an amino acid with a functional group available for conjugation to a fatty acid,
wherein the C-terminal amino acid is optionally amidated; or a pharmaceutically acceptable salt thereof.

2. The polypeptide of claim 1, or a pharmaceutically acceptable salt thereof, wherein the polypeptide comprises at least two of the following: X₁₀ is F, 3-Pal, 4-Pal, F(4CN) or F(4NO₂); X₁₁ is αMeS; X₁₃ is αMeL; X₁₆ is Orn; X₂₄ is D-Glu; and/or X₂₅ is αMeY.

3. The polypeptide of claim 1, or a pharmaceutically acceptable salt thereof, wherein the polypeptide comprises at least three of the following: X₁₀ is F, 3-Pal, 4-Pal, F(4CN) or F(4NO₂); X₁₁ is αMeS; X₁₃ is αMeL; X₁₆ is Orn; X₂₄ is D-Glu; and/or X₂₅ is αMeY.

4. The polypeptide of claim 1, or a pharmaceutically acceptable salt thereof, wherein: X₁₀ is F, 3-Pal, 4-Pal, F(4CN) or F(4NO₂).

5. The polypeptide of claim 1, or a pharmaceutically acceptable salt thereof, wherein: X₁ is Y; X₄ is G; X₆ is αMeF(2F); X₁₀ is 4-Pal; X₁₂ is I; X₁₃ is αMeL; X₁₅ is D; X₁₆ is Om; X₁₉ is Q; X₂₀ is αMe-4-Pal; X₂₁ is E or Orn; X₂₃ is I; X₂₄ is D-Glu; X₂₅ is αMeY; X₂₇ is I or V; X₂₈ is E; X₂₉ is G; X₃₁ is P; X₃₄ is G; X₃₅ is A or E; X₃₇ is P; X₃₉ is E or S; X₄₀ is G or T; X₄₁ is E, S, or G; and X₄₂ is absent.

6. The polypeptide of claim 1, or a pharmaceutically acceptable salt thereof, wherein: X₁₁ is S, X₂₁ is Orn, X₂₇ is I, X₃₅ is E, X₃₉ is E, X₄₀ is T and X₄₁ is E.

7. The polypeptide of claim 1, or a pharmaceutically acceptable salt thereof, wherein: X₁₁ is αMeS, X₂₁ is E, X₂₇ is V, X₃₅ is A, X₃₉ is S, X₄₀ is G and X₄₁ is S.

8. The polypeptide of claim 1, or a pharmaceutically acceptable salt thereof, wherein: X₁₁ is αMeS, X₂₁ is E, X₂₇ is I, X₃₅ is A, X₃₉ is S, X₄₀ is G and X₄₁ is S.

9. The polypeptide of claim 1, or a pharmaceutically acceptable salt thereof, wherein: X₁₁ is αMeS, X₂₁ is E, X₂₇ is I, X₃₅ is A, X₃₉ is S, X₄₀ is G and X₄₁ is G.

10. The polypeptide of claim 1, or a pharmaceutically acceptable salt thereof, wherein: X₁₇ is K and is conjugated to a C₁₆-C₂₂ fatty acid via a linker between the amino acid and the C₁₆-C₂₂ fatty acid.

11. The polypeptide of claim 10, or a pharmaceutically acceptable salt thereof, wherein the linker comprises one to four amino acids.

12. The polypeptide of claim 11, or a pharmaceutically acceptable salt thereof, wherein the amino acids comprised in the linker are Glu, γGlu or a combination thereof.

13. The polypeptide of claim 12, or a pharmaceutically acceptable salt thereof, wherein the linker comprises one to four (2-[2-(2-amino-ethoxy)-ethoxy]-acetyl) moieties.

14. The polypeptide of claim 13, or a pharmaceutically acceptable salt thereof, wherein the linker comprises a structure of (γGlu)ₐ-(2-[2-(2-amino-ethoxy)-ethoxy]-acetyl)_{b}-(γGlu)_{c}-CO—(CH₂)ₚ—CO₂H, wherein a is 0 or 1, bis 0, 1 or 2, c is 1, 2 or 3, and p is an integer between 14 to 20.

15. The polypeptide of claim 14, or a pharmaceutically acceptable salt thereof, wherein a is 0, b is 1 and c is 1.

16. A polypeptide selected from the group consisting of SEQ ID NO's: 294-775, 1146-1240, or a pharmaceutically acceptable salt thereof.

17. A polypeptide comprising a sequence identity of more than 90% to the polypeptide of any of SEQ ID NO's: 692, 700, 702, 705, 706, 716, 718, 743, 747, 749, 767.

18. The polypeptide of claim 17, or a pharmaceutically acceptable salt thereof, selected from the group consisting of: SEQ ID NO's: 692, 700, 705, 718 and 747.

19. The polypeptide of claim 18 consisting of SEQ ID NO. 692, or a pharmaceutically acceptable salt thereof.

20. The polypeptide of claim 18 consisting of SEQ ID NO. 700, or a pharmaceutically acceptable salt thereof.

21. The polypeptide of claim 18 consisting of SEQ ID NO. 705, or a pharmaceutically acceptable salt thereof.

22. The polypeptide of claim 18 consisting of SEQ ID NO. 718, or a pharmaceutically acceptable salt thereof.

23. The polypeptide of claim 18 consisting of SEQ ID NO. 747, or a pharmaceutically acceptable salt thereof.

24. The polypeptide of claim 1, or a pharmaceutically acceptable salt thereof, wherein the C-terminal is amidated.

25. The polypeptide of claim 1, or a pharmaceutically acceptable salt thereof, wherein the pharmaceutically acceptable salt is selected from sodium, potassium, trifluoroacetate, hydrochloride or acetate.

26. The polypeptide of claim 1, or a pharmaceutically acceptable salt thereof, wherein one or more hydrogen atoms are replaced by deuterium.

27. The polypeptide of claim 1, or a pharmaceutically acceptable salt thereof, wherein the polypeptide has greater potency at each of the glucagon, GIP and GLP-1 receptors as compared to native glucagon (SEQ ID NO:3), GIP (SEQ ID NO:1) and GLP-17-36 (SEQ ID NO:2).

28. A pharmaceutical composition comprising the polypeptide or a pharmaceutically acceptable salt thereof, of claim 1 and at least one pharmaceutically acceptable carrier, diluent, or excipient.

29. The pharmaceutical composition of claim 28, wherein the composition is formulated for oral administration.

30. The pharmaceutical composition of claim 28, wherein the composition is formulated for subcutaneous administration.

31. A method of treating a disease or condition selected from the group consisting of diabetes mellitus, obesity, chronic weight management, non-alcoholic fatty liver disease (NAFLD), non-alcoholic steatohepatitis (NASH), dyslipidemia, metabolic syndrome, chronic kidney disease (CKD), osteoarthritis (OA), obesity-related sleep apnea (OSA) polycystic ovary syndrome (PCOS), Parkinson's disease and Alzheimer's disease, the method comprising a step of: administering to an individual in need thereof an effective amount of a polypeptide, or a pharmaceutically acceptable salt thereof, of any one of claims 1 to 23.

The application's sequence listing, which the Patent Office published only in electronic form, follows.

SEQUENCE LISTING (1245 sequences)

SEQ ID NO: 1 - protein, 42 aa, Homo sapiens
  SITE 42: note = Amidated residue
YAEGTFISDYSIAMDKIHQQDFVNWLLAQKGKKNDWKHNITQ

SEQ ID NO: 2 - protein, 30 aa, Homo sapiens
  SITE 30: note = Amidated residue
HAEGTFTSDVSSYLEGQAAKEFIAWLVKGR

SEQ ID NO: 3 - protein, 29 aa, Homo sapiens
HSQGTFTSDYSKYLDSRRAQDFVQWLMNT

SEQ ID NO: 4 - protein, 42 aa, synthetic construct
  VARIANT 1: note = Y, N-methyl-tyrosine or H
  SITE 2: note = 2-Aminoisobutyric Acid
  VARIANT 6: note = F, alpha-methyl-L-phenylalanine or alpha-methyl-2-fluoro-L-phenylalanine
  VARIANT 10: note = F, 3-(4-Pyridyl)-L-alanine, 4-cyano-L-phenylalanine, 3-(3-Pyridyl)-L-alanine, 4-nitro-L-phenylalanine or Y
  VARIANT 11: note = S or alpha-methyl-L-serine
  VARIANT 12: note = L-ornithine, K, R, Q, (S)-2,3-diaminopropanoic acid, (S)-2,4-diaminobutanoic acid, S, E or I
  VARIANT 13: note = alpha-methyl-leucine, I or L
  VARIANT 16: note = K, L-ornithine, A or E
  VARIANT 17: note = Any amino acid with a functional group available for conjugation to a fatty acid, A, I or Q
  VARIANT 17: note = at least one of positions 17, 20, 24 and 28 is an amino acid with a functional group available for conjugation to a fatty acid
  VARIANT 19: note = Q or A
  VARIANT 20: note = Any amino acid with a functional group available for conjugation to a fatty acid, 2-Aminoisobutyric Acid, alpha-methyl-3-(4-Pyridyl)-L-alanine, Q or R
  VARIANT 20: note = at least one of positions 17, 20, 24 and 28 is an amino acid with a functional group available for conjugation to a fatty acid
  VARIANT 21: note = A, Q, L-ornithine, (S)-2-aminohexanedioic acid, 2-Aminoisobutyric Acid, S, N, E or T
  VARIANT 23: note = I or V
  VARIANT 24: note = Any amino acid with a functional group available for conjugation to a fatty acid, E, Q, D-Glutamic acid or N
  VARIANT 24: note = at least one of positions 17, 20, 24 and 28 is an amino acid with a functional group available for conjugation to a fatty acid
  VARIANT 25: note = W, Y, F, 3-(4-Pyridyl)-L-alanine, alpha-methyl-L-tyrosine or alpha-methyl-3-(4-Pyridyl)-L-alanine
  VARIANT 27: note = L, I, E, V, A, Q or S
  VARIANT 28: note = Any amino acid with a functional group available for conjugation to a fatty acid, E or A
  VARIANT 28: note = at least one of positions 17, 20, 24 and 28 is an amino acid with a functional group available for conjugation to a fatty acid
  VARIANT 29: note = G, D-Alanine, 2-Aminoisobutyric Acid, T or A
  VARIANT 30: note = A or G
  VARIANT 31: note = P, H, S, 3-(4-Pyridyl)-L-alanine, E, T, N6-acetyl-L-lysine or Hydroxy-L-proline
  VARIANT 34: note = G or 2-Aminoisobutyric Acid
  VARIANT 35: note = A, 2-Aminoisobutyric Acid, E, H or 3-(4-Pyridyl)-L-alanine
  VARIANT 36: note = P or Hydroxy-L-proline
  VARIANT 37: note = P, Hydroxy-L-proline or E
  VARIANT 38: note = P or Hydroxy-L-proline
  VARIANT 39: note = E, S, G, T, H, 3-(4-Pyridyl)-L-alanine, gamma-Glutamic acid or A; wherein if positions 40-42 are absent, then position 39 may be amidated
  VARIANT 40: note = May be absent or G, E, S, A or T; wherein if position 40 is absent, then position 41 and position 42 are also absent; if positions 41-42 are absent, then position 40 may be amidated
  VARIANT 41: note = wherein if position 40 is G, E, S, A or T, then position 41 may be absent or E, S, T, 3-(4-Pyridyl)-L-alanine, D, G, Q or H; wherein if position 41 is absent, then position 42 is also absent; wherein if position 42 is absent, then position 41 may be amidated
  VARIANT 42: note = wherein if position 41 is E, S, T, 3-(4-Pyridyl)-L-alanine, D, G, Q or H, then position 42 is absent or G, E or gamma-Glutamic acid; wherein if position 42 is present, then it may be amidated
XXQGTXTSDXXXXLDXXAXXXFXXXLXXXXXSSXXXXXXXXX

SEQ ID NO: 5 - protein, 42 aa, synthetic construct
  SITE 2: note = 2-Aminoisobutyric Acid
  VARIANT 10: note = F, 3-(4-Pyridyl)-L-alanine or 4-cyano-L-phenylalanine
  VARIANT 12: note = L-ornithine, K, R, Q, (S)-2,3-diaminopropanoic acid or (S)-2,4-diaminobutanoic acid
  SITE 13: note = alpha-methyl-leucine
  VARIANT 16: note = K or L-ornithine
  VARIANT 17: note = Any amino acid with a functional group available for conjugation to a fatty acid
  VARIANT 20: note = 2-Aminoisobutyric Acid, alpha-methyl-3-(4-Pyridyl)-L-alanine or Q
  VARIANT 21: note = A, Q or L-ornithine
  VARIANT 24: note = E or Q
  VARIANT 25: note = W, Y, 3-(4-Pyridyl)-L-alanine, alpha-methyl-L-tyrosine or alpha-methyl-3-(4-Pyridyl)-L-alanine
  VARIANT 27: note = L or I
  VARIANT 28: note = E or A
  VARIANT 29: note = G, D-Alanine or 2-Aminoisobutyric Acid
  VARIANT 30: note = A or G
  VARIANT 31: note = P, H, S, 3-(4-Pyridyl)-L-alanine, E, T, N6-acetyl-L-lysine or Hydroxy-L-proline
  VARIANT 34: note = G or 2-Aminoisobutyric Acid
  VARIANT 35: note = A, 2-Aminoisobutyric Acid, E, H or 3-(4-Pyridyl)-L-alanine
  VARIANT 36: note = P or Hydroxy-L-proline
  VARIANT 37: note = P or Hydroxy-L-proline
  VARIANT 38: note = P or Hydroxy-L-proline
  VARIANT 39: note = E, S, G, T, H, 3-(4-Pyridyl)-L-alanine or gamma-Glutamic acid; wherein if positions 40-42 are absent, then position 39 may be amidated
  VARIANT 40: note = May be absent or G, E or S; wherein if position 40 is absent, then positions 41-42 are also absent; if positions 41-42 are absent, then position 40 may be amidated
  VARIANT 41: note = wherein if position 40 is G, E or S, then position 41 may be absent or E, S, T, 3-(4-Pyridyl)-L-alanine, D, G, Q or H; wherein if position 41 is absent, then position 42 is also absent; wherein if position 42 is absent, then position 41 may be amidated
  VARIANT 42: note = wherein if position 41 is E, S, T, 3-(4-Pyridyl)-L-alanine, D, G, Q or H, then position 42 may be absent or G, E or gamma-Glutamic acid; wherein if position 42 is present, then it may be amidated
YXQGTFTSDXSXXLDXXAQXXFIXXLXXXXXSSXXXXXXXXX

SEQ ID NO: 6 - protein, 41 aa, synthetic construct
  VARIANT 1: note = Y, N-methyl-tyrosine or H
  SITE 2: note = 2-Aminoisobutyric Acid
  VARIANT 6: note = F, alpha-methyl-L-phenylalanine or alpha-methyl-2-fluoro-L-phenylalanine
  VARIANT 10: note = F, 3-(3-Pyridyl)-L-alanine, 3-(4-Pyridyl)-L-alanine, 4-cyano-L-phenylalanine, 4-nitro-L-phenylalanine or Y
  VARIANT 11: note = S or alpha-methyl-L-serine
  VARIANT 12: note = L-ornithine, K, R, Q, (S)-2,3-diaminopropanoic acid, S, E or I; wherein if position 10 is F, 3-(3-Pyridyl)-L-alanine, 3-(4-Pyridyl)-L-alanine, 4-cyano-L-phenylalanine, or 4-nitro-L-phenylalanine, then position 12 is I
  VARIANT 13: note = alpha-methyl-leucine, I or L
  VARIANT 16: note = K, L-ornithine, A or E
  VARIANT 17: note = Any amino acid with a functional group available for conjugation to a fatty acid, A, I or Q
  VARIANT 17: note = at least one of positions 17, 20, 24 and 28 is an amino acid with a functional group available for conjugation to a fatty acid
  VARIANT 19: note = A or Q
  VARIANT 20: note = Any amino acid with a functional group available for conjugation to a fatty acid 2-Aminoisobutyric Acid, Q, R or alpha-methyl-3-(4-Pyridyl)-L-alanine
  VARIANT 20: note = at least one of positions 17, 20, 24 and 28 is an amino acid with a functional group available for conjugation to a fatty acid
  VARIANT 21: note = A, (S)-2-aminohexanedioic acid, 2-Aminoisobutyric Acid, S, N, Q, E, T or L-ornithine
  VARIANT 23: note = I or V
  VARIANT 24: note = Any amino acid with a functional group available for conjugation to a fatty acid E, D-Glutamic acid, Q or N
  VARIANT 24: note = at least one of positions 17, 20, 24 and 28 is an amino acid with a functional group available for conjugation to a fatty acid
  VARIANT 25: note = W, Y, F, 3-(4-Pyridyl)-L-alanine, alpha-methyl-L-tyrosine or alpha-methyl-3-(4-Pyridyl)-L-alanine
  VARIANT 27: note = L, I, E, V, A, Q or S
  VARIANT 28: note = Any amino acid with a functional group available for conjugation to a fatty acid, E or A
  VARIANT 28: note = at least one of positions 17, 20, 24 and 28 is an amino acid with a functional group available for conjugation to a fatty acid
  VARIANT 29: note = G, 2-Aminoisobutyric Acid, T, D-Alanine or A
  VARIANT 31: note = P or E
  VARIANT 34: note = G or 2-Aminoisobutyric Acid
  VARIANT 35: note = A or E
  VARIANT 37: note = P or E
  VARIANT 39: note = E, S, G or A; wherein if positions 40-41 are absent, then position 39 may be amidated
  VARIANT 40: note = May be absent or G, E, S, A or T; wherein if position 40 is absent, then position 41 is also absent; if position 41 is absent, then position 40 may be amidated
  VARIANT 41: note = wherein if position 40 is G, E, S, A or T, then position 41 may be absent or is E, S, D or G; wherein if position 41 is present, then it may be amidated
XXQGTXTSDXXXXLDXXAXXXFXXXLXXXGXSSXXPXPXXX

SEQ ID NO: 7 - protein, 41 aa, synthetic construct
  SITE 2: note = 2-Aminoisobutyric Acid
  SITE 13: note = alpha-methyl-leucine
  SITE 17: note = Lysine is chemically modified through conjugation of the epsilon-amino group of the Lysine side chain with (2-[2-(2-Amino-ethoxy)-ethoxy]-acetyl)-(gamma-Glu)-CO-(CH2) 18-CO2H
  SITE 20: note = 2-Aminoisobutyric Acid
  SITE 41: note = Amidated residue
YXQGTFTSDFSKXLDKKAQXAFIEYLLAGGPSSGEPPPSEG

SEQ ID NO: 8 - protein, 41 aa, synthetic construct
  SITE 2: note = 2-Aminoisobutyric Acid
  SITE 13: note = alpha-methyl-leucine
  SITE 17: note = Lysine is chemically modified through conjugation of the epsilon-amino group of the Lysine side chain with (2-[2-(2-Amino-ethoxy)-ethoxy]-acetyl)-(gamma-Glu)-CO-(CH2) 18-CO2H
  SITE 20: note = 2-Aminoisobutyric Acid
  SITE 41: note = Amidated residue
YXQGTFTSDFSKXLDKKAQXAFIEYLLAGGPSSGEPPPSGE

SEQ ID NO: 9 - protein, 41 aa, synthetic construct
  SITE 2: note = 2-Aminoisobutyric Acid
  SITE 13: note = alpha-methyl-leucine
  SITE 17: note = Lysine is chemically modified through conjugation of the epsilon-amino group of the Lysine side chain with (2-[2-(2-Amino-ethoxy)-ethoxy]-acetyl)-(gamma-Glu)-CO-(CH2) 18-CO2H
  SITE 20: note = 2-Aminoisobutyric Acid
  SITE 41: note = Amidated residue
YXQGTFTSDFSKXLDKKAQXAFIEYLLAGGPSSGEPPPSSE

SEQ ID NO: 10 - protein, 41 aa, synthetic construct
  SITE 2: note = 2-Aminoisobutyric Acid
  SITE 13: note = alpha-methyl-leucine
  SITE 17: note = Lysine is chemically modified through conjugation of the epsilon-amino group of the Lysine side chain with (2-[2-(2-Amino-ethoxy)-ethoxy]-acetyl)-(gamma-Glu)-CO-(CH2) 18-CO2H
  SITE 20: note = 2-Aminoisobutyric Acid
  SITE 41: note = Amidated residue
YXQGTFTSDFSKXLDKKAQXAFIEYLLAGGPSSGEPPPSEE

SEQ ID NO: 11 - protein, 41 aa, synthetic construct; identical to SEQ ID NO: 9
  SITE 2: note = 2-Aminoisobutyric Acid
  SITE 13: note = alpha-methyl-leucine
  SITE 17: note = Lysine is chemically modified through conjugation of the epsilon-amino group of the Lysine side chain with (2-[2-(2-Amino-ethoxy)-ethoxy]-acetyl)2-(gamma-Glu)-CO-(CH2 )18-CO2H
  SITE 20: note = 2-Aminoisobutyric Acid
  SITE 41: note = Amidated residue

SEQ ID NO: 12 - protein, 41 aa, synthetic construct
  SITE 2: note = 2-Aminoisobutyric Acid
  SITE 13: note = alpha-methyl-leucine
  SITE 17: note = Lysine is chemically modified through conjugation of the epsilon-amino group of the Lysine side chain with (2-[2-(2-Amino-ethoxy)-ethoxy]-acetyl)-(gamma-Glu)-CO-(CH2) 18-CO2H
  SITE 20: note = 2-Aminoisobutyric Acid
  SITE 41: note = Amidated residue
YXQGTFTSDFSKXLDKKAQXAFIEYLLAGGPSSGEPPPSGG

SEQ ID NO: 13 - protein, 41 aa, synthetic construct
  SITE 2: note = 2-Aminoisobutyric Acid
  SITE 13: note = alpha-methyl-leucine
  SITE 17: note = Lysine is chemically modified through conjugation of the epsilon-amino group of the Lysine side chain with (2-[2-(2-Amino-ethoxy)-ethoxy]-acetyl)-(gamma-Glu)-CO-(CH2) 18-CO2H
  SITE 20: note = 2-Aminoisobutyric Acid
  SITE 41: note = Amidated residue
YXQGTFTSDFSKXLDKKAQXAFIEYLLAGGPSSGEPPPSSG

SEQ ID NO: 14 - protein, 41 aa, synthetic construct
  SITE 2: note = 2-Aminoisobutyric Acid
  SITE 13: note = alpha-methyl-leucine
  SITE 17: note = Lysine is chemically modified through conjugation of the epsilon-amino group of the Lysine side chain with (2-[2-(2-Amino-ethoxy)-ethoxy]-acetyl)-(gamma-Glu)-CO-(CH2) 18-CO2H
  SITE 20: note = 2-Aminoisobutyric Acid
  SITE 41: note = Amidated residue
YXQGTFTSDFSKXLDKKAQXAFIEYLLAGGPSSGEPPPSGS

SEQ ID NO: 15 - protein, 41 aa, synthetic construct
  SITE 2: note = 2-Aminoisobutyric Acid
  SITE 13: note = alpha-methyl-leucine
  SITE 17: note = Lysine is chemically modified through conjugation of the epsilon-amino group of the Lysine side chain with (2-[2-(2-Amino-ethoxy)-ethoxy]-acetyl)-(gamma-Glu)-CO-(CH2) 18-CO2H
  SITE 20: note = 2-Aminoisobutyric Acid
  SITE 41: note = Amidated residue
YXQGTFTSDFSKXLDKKAQXAFIEYLLAGGPSSGEPPPGGS

SEQ ID NO: 16 - protein, 41 aa, synthetic construct
  SITE 2: note = 2-Aminoisobutyric Acid
  SITE 13: note = alpha-methyl-leucine
  SITE 17: note = Lysine is chemically modified through conjugation of the epsilon-amino group of the Lysine side chain with (2-[2-(2-Amino-ethoxy)-ethoxy]-acetyl)-(gamma-Glu)-CO-(CH2) 18-CO2H
  SITE 20: note = 2-Aminoisobutyric Acid
  SITE 41: note = Amidated residue
YXQGTFTSDFSKXLDKKAQXAFIEYLLAGGPSSGAPPPSEG

SEQ ID NO: 17 - protein, 41 aa, synthetic construct
  SITE 2: note = 2-Aminoisobutyric Acid
  SITE 13: note = alpha-methyl-leucine
  SITE 17: note = Lysine is chemically modified through conjugation of the epsilon-amino group of the Lysine side chain with (2-[2-(2-Amino-ethoxy)-ethoxy]-acetyl)-(gamma-Glu)-CO-(CH2) 18-CO2H
  SITE 20: note = 2-Aminoisobutyric Acid
  SITE 41: note = Amidated residue
YXQGTFTSDFSKXLDKKAQXAFIEYLLAGGPSSGAPPPSGE

SEQ ID NO: 18 - protein, 41 aa, synthetic construct
  SITE 2: note = 2-Aminoisobutyric Acid
  SITE 13: note = alpha-methyl-leucine
  SITE 17: note = Lysine is chemically modified through conjugation of the epsilon-amino group of the Lysine side chain with (2-[2-(2-Amino-ethoxy)-ethoxy]-acetyl)-(gamma-Glu)-CO-(CH2) 18-CO2H
  SITE 20: note = 2-Aminoisobutyric Acid
  SITE 41: note = Amidated residue
YXQGTFTSDFSKXLDKKAQXAFIEYLLAGGPSSGAPPPSGG

SEQ ID NO: 19 - protein, 41 aa, synthetic construct
  SITE 2: note = 2-Aminoisobutyric Acid
  SITE 13: note = alpha-methyl-leucine
  SITE 17: note = Lysine is chemically modified through conjugation of the epsilon-amino group of the Lysine side chain with (2-[2-(2-Amino-ethoxy)-ethoxy]-acetyl)-(gamma-Glu)-CO-(CH2) 18-CO2H
  SITE 20: note = 2-Aminoisobutyric Acid
  SITE 41: note = Amidated residue
YXQGTFTSDFSKXLDKKAQXAFIEYLLAGGPSSGAPPPSSG

SEQ ID NO: 20 - protein, 41 aa, synthetic construct
  SITE 2: note = 2-Aminoisobutyric Acid
  SITE 13: note = alpha-methyl-leucine
  SITE 17: note = Lysine is chemically modified through conjugation of the epsilon-amino group of the Lysine side chain with (2-[2-(2-Amino-ethoxy)-ethoxy]-acetyl)-(gamma-Glu)-CO-(CH2) 18-CO2H
  SITE 20: note = 2-Aminoisobutyric Acid
  SITE 41: note = Amidated residue
YXQGTFTSDFSKXLDKKAQXAFIEYLLAGGPSSGAPPPSGS

SEQ ID NO: 21 - protein, 41 aa, synthetic construct
  SITE 2: note = 2-Aminoisobutyric Acid
  SITE 13: note = alpha-methyl-leucine
  SITE 17: note = Lysine is chemically modified through conjugation of the epsilon-amino group of the Lysine side chain with (2-[2-(2-Amino-ethoxy)-ethoxy]-acetyl)-(gamma-Glu)-CO-(CH2) 18-CO2H
  SITE 20: note = 2-Aminoisobutyric Acid
  SITE 41: note = Amidated residue
YXQGTFTSDFSKXLDKKAQXAFIEYLLAGGPSSGAPPPGGE

SEQ ID NO: 22 - protein, 41 aa, synthetic construct
  SITE 2: note = 2-Aminoisobutyric Acid
  SITE 13: note = alpha-methyl-leucine
  SITE 17: note = Lysine is chemically modified through conjugation of the epsilon-amino group of the Lysine side chain with (2-[2-(2-Amino-ethoxy)-ethoxy]-acetyl)-(gamma-Glu)-CO-(CH2) 18-CO2H
  SITE 20: note = 2-Aminoisobutyric Acid
  SITE 41: note = Amidated residue
YXQGTFTSDFSKXLDKKAQXAFIEYLLAGGPSSGAPPPGGS

SEQ ID NO: 23 - protein, 41 aa, synthetic construct
  SITE 2: note = 2-Aminoisobutyric Acid
  SITE 13: note = alpha-methyl-leucine
  SITE 17: note = Lysine is chemically modified through conjugation of the epsilon-amino group of the Lysine side chain with (2-[2-(2-Amino-ethoxy)-ethoxy]-acetyl)2-(gamma-Glu)-CO-(CH2 )18-CO2H
  SITE 20: note = 2-Aminoisobutyric Acid
  SITE 41: note = Amidated residue
YXQGTFTSDFSKXLDKKAQXAFIEYLLEGGPSSGAPPPGEG

SEQ ID NO: 24 - protein, 41 aa, synthetic construct
  SITE 2: note = 2-Aminoisobutyric Acid
  SITE 13: note = alpha-methyl-leucine
  SITE 17: note = Lysine is chemically modified through conjugation of the epsilon-amino group of the Lysine side chain with (2-[2-(2-Amino-ethoxy)-ethoxy]-acetyl)-(gamma-Glu)-CO-(CH2) 18-CO2H
  SITE 20: note = 2-Aminoisobutyric Acid
  SITE 41: note = Amidated residue
YXQGTFTSDFSKXLDKKAQXAFIEYLLEGGPSSGAPPPGGS

SEQ ID NO: 25 - protein, 41 aa, synthetic construct
  SITE 2: note = 2-Aminoisobutyric Acid
  SITE 13: note = alpha-methyl-leucine
  SITE 17: note = Lysine is chemically modified through conjugation of the epsilon-amino group of the Lysine side chain with (2-[2-(2-Amino-ethoxy)-ethoxy]-acetyl)-(gamma-Glu)-CO-(CH2) 18-CO2H
  SITE 29: note = 2-Aminoisobutyric Acid
  SITE 41: note = Amidated residue
YXQGTFTSDFSKXLDKKAQQAFIEYLLAXGPSSGEPPPSEG

SEQ ID NO: 26 - protein, 41 aa, synthetic construct
  SITE 2: note = 2-Aminoisobutyric Acid
  SITE 13: note = alpha-methyl-leucine
  SITE 17: note = Lysine is chemically modified through conjugation of the epsilon-amino group of the Lysine side chain with (2-[2-(2-Amino-ethoxy)-ethoxy]-acetyl)-(gamma-Glu)-CO-(CH2) 18-CO2H
  SITE 20: note = 2-Aminoisobutyric Acid
  SITE 41: note = Amidated residue
YXQGTFTSDFSKXLDKKAQXAFIEWLLAGGPSSGEPPPSEG

SEQ ID NO: 27 - protein, 41 aa, synthetic construct
  SITE 2: note = 2-Aminoisobutyric Acid
  SITE 13: note = alpha-methyl-leucine
  SITE 17: note = Lysine is chemically modified through conjugation of the epsilon-amino group of the Lysine side chain with (2-[2-(2-Amino-ethoxy)-ethoxy]-acetyl)-(gamma-Glu)-CO-(CH2) 18-CO2H
  SITE 20: note = 2-Aminoisobutyric Acid
  SITE 41: note = Amidated residue
YXQGTFTSDFSKXLDKKAQXAFIEWLLAGGPSSGEPPPSGE

SEQ ID NO: 28 - protein, 41 aa, synthetic construct; identical to SEQ ID NO: 7
  SITE 2: note = 2-Aminoisobutyric Acid
  SITE 13: note = alpha-methyl-leucine
  SITE 17: note = Lysine is chemically modified through conjugation of the epsilon-amino group of the Lysine side chain with (2-[2-(2-Amino-ethoxy)-ethoxy]-acetyl)-(gamma-Glu)-CO-(CH2) 16-CO2H
  SITE 20: note = 2-Aminoisobutyric Acid
  SITE 41: note = Amidated residue

SEQ ID NO: 29 - protein, 41 aa, synthetic construct; identical to SEQ ID NO: 8
  SITE 2: note = 2-Aminoisobutyric Acid
  SITE 13: note = alpha-methyl-leucine
  SITE 17: note = Lysine is chemically modified through conjugation of the epsilon-amino group of the Lysine side chain with (2-[2-(2-Amino-ethoxy)-ethoxy]-acetyl)-(gamma-Glu)-CO-(CH2) 16-CO2H
  SITE 20: note = 2-Aminoisobutyric Acid
  SITE 41: note = Amidated residue

SEQ ID NO: 30 - protein, 41 aa, synthetic construct
  SITE 2: note = 2-Aminoisobutyric Acid
  SITE 13: note = alpha-methyl-leucine
  SITE 17: note = Lysine is chemically modified through conjugation of the epsilon-amino group of the Lysine side chain with (2-[2-(2-Amino-ethoxy)-ethoxy]-acetyl)-(gamma-Glu)-CO-(CH2) 18-CO2H
  SITE 20: note = 2-Aminoisobutyric Acid
  SITE 41: note = Amidated residue
YXQGTFTSDFSKXLDKKAQXAFIEYLLAGAPSSGAPPPSEG

SEQ ID NO: 31 - protein, 41 aa, synthetic construct; identical to SEQ ID NO: 7
  SITE 2: note = 2-Aminoisobutyric Acid
  SITE 13: note = alpha-methyl-leucine
  SITE 17: note = Lysine is chemically modified through conjugation of the epsilon-amino group of the Lysine side chain with (2-[2-(2-Amino-ethoxy)-ethoxy]-acetyl)2-(gamma-Glu)-CO-(CH2 )16-CO2H
  SITE 20: note = 2-Aminoisobutyric Acid
  SITE 41: note = Amidated residue

SEQ ID NO: 32 - protein, 41 aa, synthetic construct
  SITE 2: note = 2-Aminoisobutyric Acid
  SITE 13: note = alpha-methyl-leucine
  SITE 17: note = Lysine is chemically modified through conjugation of the epsilon-amino group of the Lysine side chain with (2-[2-(2-Amino-ethoxy)-ethoxy]-acetyl)-(gamma-Glu)-CO-(CH2) 16-CO2H
  SITE 20: note = 2-Aminoisobutyric Acid
  SITE 41: note = Amidated residue
YXQGTFTSDFSKXLDKKAQXQFIEYLLAGGPSSGEPPPSEG

SEQ ID NO: 33 - protein, 41 aa, synthetic construct
  SITE 2: note = 2-Aminoisobutyric Acid
  SITE 13: note = alpha-methyl-leucine
  SITE 17: note = Lysine is chemically modified through conjugation of the epsilon-amino group of the Lysine side chain with (2-[2-(2-Amino-ethoxy)-ethoxy]-acetyl)-(gamma-Glu)-CO-(CH2) 18-CO2H
  SITE 20: note = 2-Aminoisobutyric Acid
  SITE 41: note = Amidated residue
YXQGTFTSDFSKXLDKKAQXAFIQYLLAGGPSSGEPPPSEG

SEQ ID NO: 34 - protein, 41 aa, synthetic construct
  SITE 2: note = 2-Aminoisobutyric Acid
  SITE 10: note = 3-(4-Pyridyl)-L-alanine
  SITE 13: note = alpha-methyl-leucine
  SITE 17: note = Lysine is chemically modified through conjugation of the epsilon-amino group of the Lysine side chain with (2-[2-(2-Amino-ethoxy)-ethoxy]-acetyl)-(gamma-Glu)-CO-(CH2) 18-CO2H
  SITE 20: note = 2-Aminoisobutyric Acid
  SITE 41: note = Amidated residue
YXQGTFTSDXSKXLDKKAQXAFIEYLLAGGPSSGEPPPSGE

SEQ ID NO: 35 - protein, 41 aa, synthetic construct
  SITE 2: note = 2-Aminoisobutyric Acid
  SITE 12: note = L-ornithine
  SITE 13: note = alpha-methyl-leucine
  SITE 17: note = Lysine is chemically modified through conjugation of the epsilon-amino group of the Lysine side chain with (2-[2-(2-Amino-ethoxy)-ethoxy]-acetyl)-(gamma-Glu)-CO-(CH2) 18-CO2H
  SITE 20: note = 2-Aminoisobutyric Acid
  SITE 41: note = Amidated residue
YXQGTFTSDFSXXLDKKAQXAFIEYLLAGGPSSGEPPPSEG

SEQ ID NO: 36 - protein, 41 aa, synthetic construct
  SITE 2: note = 2-Aminoisobutyric Acid
  SITE 13: note = alpha-methyl-leucine
  SITE 17: note = Lysine is chemically modified through conjugation of the epsilon-amino group of the Lysine side chain with (2-[2-(2-Amino-ethoxy)-ethoxy]-acetyl)-(gamma-Glu)-CO-(CH2) 18-CO2H
  SITE 29: note = 2-Aminoisobutyric Acid
  SITE 41: note = Amidated residue
YXQGTFTSDFSKXLDKKAQQAFIEYLLAXGPSSGAPPPSEG

SEQ ID NO: 37 - protein, 41 aa, synthetic construct
  SITE 2: note = 2-Aminoisobutyric Acid
  SITE 13: note = alpha-methyl-leucine
  SITE 17: note = Lysine is chemically modified through conjugation of the epsilon-amino group of the Lysine side chain with (2-[2-(2-Amino-ethoxy)-ethoxy]-acetyl)-(gamma-Glu)-CO-(CH2) 18-CO2H
  SITE 20: note = 2-Aminoisobutyric Acid
  SITE 41: note = Amidated residue
YXQGTFTSDFSKXLDKKAQXAFIEYLLAGGPSSGEPPPGEG

SEQ ID NO: 38 - protein, 42 aa, synthetic construct
  SITE 2: note = 2-Aminoisobutyric Acid
  SITE 13: note = alpha-methyl-leucine
  SITE 17: note = Lysine is chemically modified through conjugation of the epsilon-amino group of the Lysine side chain with (2-[2-(2-Amino-ethoxy)-ethoxy]-acetyl)-(gamma-Glu)-CO-(CH2) 18-CO2H
  SITE 20: note = 2-Aminoisobutyric Acid
  SITE 42: note = 2-[2-(2-Amino-ethoxy)-ethoxy]-acetic amide
YXQGTFTSDFSKXLDKKAQXAFIEYLLAGGPSSGEPPPSEGX

SEQ ID NO: 39 - protein, 42 aa, synthetic construct
  SITE 2: note = 2-Aminoisobutyric Acid
  SITE 13: note = alpha-methyl-leucine
  SITE 17: note = Lysine is chemically modified through conjugation of the epsilon-amino group of the Lysine side chain with (2-[2-(2-Amino-ethoxy)-ethoxy]-acetyl)-(gamma-Glu)-CO-(CH2) 18-CO2H
  SITE 20: note = 2-Aminoisobutyric Acid
  SITE 42: note = 2-[2-(2-Amino-ethoxy)-ethoxy]-acetic amide
YXQGTFTSDFSKXLDKKAQXAFIEYLLAGGPSSGEPPPSGEX

SEQ ID NO: 40 - protein, 41 aa, synthetic construct
  SITE 2: note = 2-Aminoisobutyric Acid
  SITE 13: note = alpha-methyl-leucine
  SITE 17: note = Lysine is chemically modified through conjugation of the epsilon-amino group of the Lysine side chain with (2-[2-(2-Amino-ethoxy)-ethoxy]-acetyl)-(gamma-Glu)-CO-(CH2) 18-CO2H
  SITE 20: note = 2-Aminoisobutyric Acid
  SITE 29: note = D-amino acid
  SITE 41: note = Amidated residue
YXQGTFTSDFSKXLDKKAQXAFIEYLLEAGPSSGAPPPGEG

SEQ ID NO: 41 - protein, 41 aa, synthetic construct
  SITE 2: note = 2-Aminoisobutyric Acid
  SITE 13: note = alpha-methyl-leucine
  SITE 17: note = Lysine is chemically modified through conjugation of the epsilon-amino group of the Lysine side chain with (2-[2-(2-Amino-ethoxy)-ethoxy]-acetyl)-(gamma-Glu)-CO-(CH2) 18-CO2H
  SITE 20: note = 2-Aminoisobutyric Acid
  SITE 41: note = Amidated residue
YXQGTFTSDFSKXLDKKAQXAFIEYLLEGGPSSGEPPPEEG

SEQ ID NO: 42 - protein, 41 aa, synthetic construct
  SITE 2: note = 2-Aminoisobutyric Acid
  SITE 13: note = alpha-methyl-leucine
  SITE 17: note = Lysine is chemically modified through conjugation of the epsilon-amino group of the Lysine side chain with (2-[2-(2-Amino-ethoxy)-ethoxy]-acetyl)-(gamma-Glu)-CO-(CH2) 18-CO2H
  SITE 20: note = 2-Aminoisobutyric Acid
  SITE 41: note = Amidated residue
YXQGTFTSDFSKXLDKKAQXAFIEYLLEGGPSSGEPPPTEG

SEQ ID NO: 43 - protein, 41 aa, synthetic construct
  SITE 2: note = 2-Aminoisobutyric Acid
  SITE 13: note = alpha-methyl-leucine
  SITE 17: note = Lysine is chemically modified through conjugation of the epsilon-amino group of the Lysine side chain with (2-[2-(2-Amino-ethoxy)-ethoxy]-acetyl)-(gamma-Glu)-CO-(CH2) 18-CO2H
  SITE 20: note = 2-Aminoisobutyric Acid
  SITE 41: note = Amidated residue
YXQGTFTSDFSKXLDKKAQXAFIEWLLEGGPSSGAPPPSEG

SEQ ID NO: 44 - protein, 41 aa, synthetic construct
  SITE 2: note = 2-Aminoisobutyric Acid
  SITE 13: note = alpha-methyl-leucine
  SITE 17: note = Lysine is chemically modified through conjugation of the epsilon-amino group of the Lysine side chain with (2-[2-(2-Amino-ethoxy)-ethoxy]-acetyl)-(gamma-Glu)-CO-(CH2) 18-CO2H
  SITE 20: note = 2-Aminoisobutyric Acid
  SITE 41: note = Amidated residue
YXQGTFTSDFSKXLDKKAQXQFIEWLLEGGPSSGAPPPSEG

SEQ ID NO: 45 - protein, 41 aa, synthetic construct
  SITE 2: note = 2-Aminoisobutyric Acid
  SITE 13: note = alpha-methyl-leucine
  SITE 17: note = Lysine is chemically modified through conjugation of the epsilon-amino group of the Lysine side chain with (2-[2-(2-Amino-ethoxy)-ethoxy]-acetyl)-(gamma-Glu)-CO-(CH2) 18-CO2H
  SITE 20: note = 2-Aminoisobutyric Acid
  SITE 41: note = Amidated residue
YXQGTFTSDFSKXLDKKAQXAFIQWLLEGGPSSGAPPPSEG

SEQ ID NO: 46 - protein, 41 aa, synthetic construct
  SITE 2: note = 2-Aminoisobutyric Acid
  SITE 13: note = alpha-methyl-leucine
  SITE 17: note = Lysine is chemically modified through conjugation of the epsilon-amino group of the Lysine side chain with (2-[2-(2-Amino-ethoxy)-ethoxy]-acetyl)-(gamma-Glu)-CO-(CH2) 18-CO2H
  SITE 20: note = 2-Aminoisobutyric Acid
  SITE 41: note = Amidated residue
YXQGTFTSDFSKXLDKKAQXAFIEWLIEGGPSSGAPPPSEG

SEQ ID NO: 47 - protein, 41 aa, synthetic construct
  SITE 2: note = 2-Aminoisobutyric Acid
  SITE 13: note = alpha-methyl-leucine
  SITE 17: note = Lysine is chemically modified through conjugation of the epsilon-amino group of the Lysine side chain with (2-[2-(2-Amino-ethoxy)-ethoxy]-acetyl)-(gamma-Glu)-CO-(CH2) 18-CO2H
  SITE 20: note = 2-Aminoisobutyric Acid
  SITE 41: note = Amidated residue
YXQGTFTSDFSRXLDKKAQXAFIEYLLEGGPSSGAPPPGGS

SEQ ID NO: 48 - protein, 41 aa, synthetic construct
  SITE 2: note = 2-Aminoisobutyric Acid
  SITE 13: note = alpha-methyl-leucine
  SITE 17: note = Lysine is chemically modified through conjugation of the epsilon-amino group of the Lysine side chain with (2-[2-(2-Amino-ethoxy)-ethoxy]-acetyl)-(gamma-Glu)-CO-(CH2) 18-CO2H
  SITE 20: note = 2-Aminoisobutyric Acid
  SITE 29: note = 2-Aminoisobutyric Acid
  SITE 41: note = Amidated residue
YXQGTFTSDFSRXLDKKAQXAFIEYLLEXGPSSGAPPPGGS

SEQ ID NO: 49 - protein, 41 aa, synthetic construct
  SITE 2: note = 2-Aminoisobutyric Acid
  SITE 13: note = alpha-methyl-leucine
  SITE 17: note = Lysine is chemically modified through conjugation of the epsilon-amino group of the Lysine side chain with (2-[2-(2-Amino-ethoxy)-ethoxy]-acetyl)-(gamma-Glu)-CO-(CH2) 18-CO2H
  SITE 20: note = 2-Aminoisobutyric Acid
  SITE 29: note = 2-Aminoisobutyric Acid
  SITE 41: note = Amidated residue
YXQGTFTSDFSKXLDKKAQXAFIEYLLEXGPSSGAPPPGGS

SEQ ID NO: 50 - protein, 41 aa, synthetic construct
  SITE 2: note = 2-Aminoisobutyric Acid
  SITE 13: note = alpha-methyl-leucine
  SITE 17: note = Lysine is chemically modified through conjugation of the epsilon-amino group of the Lysine side chain with (2-[2-(2-Amino-ethoxy)-ethoxy]-acetyl)-(gamma-Glu)-CO-(CH2) 18-CO2H
  SITE 20: note = 2-Aminoisobutyric Acid
  SITE 29: note = 2-Aminoisobutyric Acid
  SITE 41: note = Amidated residue
YXQGTFTSDFSKXLDKKAQXAFIEYLLEXGPSSGAPPPSSG

SEQ ID NO: 51 - protein, 41 aa, synthetic construct
  SITE 2: note = 2-Aminoisobutyric Acid
  SITE 13: note = alpha-methyl-leucine
  SITE 17: note = Lysine is chemically modified through conjugation of the epsilon-amino group of the Lysine side chain with (2-[2-(2-Amino-ethoxy)-ethoxy]-acetyl)-(gamma-Glu)-CO-(CH2) 18-CO2H
  SITE 20: note = 2-Aminoisobutyric Acid
  SITE 29: note = 2-Aminoisobutyric Acid
  SITE 41: note = Amidated residue
YXQGTFTSDFSKXLDKKAQXAFIEYLLEXGPSSGAPPPSGS

SEQ ID NO: 52 - protein, 41 aa, synthetic construct
  SITE 2: note = 2-Aminoisobutyric Acid
  SITE 13: note = alpha-methyl-leucine
  SITE 17: note = Lysine is chemically modified through conjugation of the epsilon-amino group of the Lysine side chain with (2-[2-(2-Amino-ethoxy)-ethoxy]-acetyl)-(gamma-Glu)-CO-(CH2) 16-CO2H
  SITE 20: note = 2-Aminoisobutyric Acid
  SITE 29: note = 2-Aminoisobutyric Acid
  SITE 41: note = Amidated residue
YXQGTFTSDFSKXLDKKAQXAFIEYLLEXGPSSGEPPPSEG

SEQ ID NO: 53 - protein, 41 aa, synthetic construct
  SITE 2: note = 2-Aminoisobutyric Acid
  SITE 13: note = alpha-methyl-leucine
  SITE 17: note = Lysine is chemically modified through conjugation of the epsilon-amino group of the Lysine side chain with (2-[2-(2-Amino-ethoxy)-ethoxy]-acetyl)-(gamma-Glu)-CO-(CH2) 18-CO2H
  SITE 20: note = 2-Aminoisobutyric Acid
  SITE 41: note = Amidated residue
YXQGTFTSDFSKXLDKKAQXAFIEYLLEGAPSSGAPPPSEG

SEQ ID NO: 54 - protein, 41 aa, synthetic construct
  SITE 2: note = 2-Aminoisobutyric Acid
  SITE 13: note = alpha-methyl-leucine
  SITE 17: note = Lysine is chemically modified through conjugation of the epsilon-amino group of the Lysine side chain with (2-[2-(2-Amino-ethoxy)-ethoxy]-acetyl)-(gamma-Glu)-CO-(CH2) 16-CO2H
  SITE 20: note = 2-Aminoisobutyric Acid
  SITE 41: note = Amidated residue
YXQGTFTSDFSKXLDKKAQXAFIEYLLEGGPSSGAPPPSEG

SEQ ID NO: 55 - protein, 41 aa, synthetic construct
  SITE 2: note = 2-Aminoisobutyric Acid
  SITE 13: note = alpha-methyl-leucine
  SITE 17: note = Lysine is chemically modified through conjugation of the epsilon-amino group of the Lysine side chain with (2-[2-(2-Amino-ethoxy)-ethoxy]-acetyl)-(gamma-Glu)-CO-gamma -gamma-(CH2)16-CO2H
  SITE 20: note = 2-Aminoisobutyric Acid
  SITE 41: note = Amidated residue
YXQGTFTSDFSKXLDKKAQXAFIEYLIEGGPSSGAPPPSEG

SEQ ID NO: 56 - protein, 41 aa, synthetic construct
  SITE 2: note = 2-Aminoisobutyric Acid
  SITE 12: note = L-ornithine
  SITE 13: note = alpha-methyl-leucine
  SITE 17: note = Lysine is chemically modified through conjugation of the epsilon-amino group of the Lysine side chain with (2-[2-(2-Amino-ethoxy)-ethoxy]-acetyl)-(gamma-Glu)-CO-(CH2) 16-CO2H
  SITE 20: note = 2-Aminoisobutyric Acid
  SITE 41: note = Amidated residue
YXQGTFTSDFSXXLDKKAQXAFIEYLLEGGPSSGAPPPSEG

SEQ ID NO: 57 - protein, 41 aa, synthetic construct
  SITE 2: note = 2-Aminoisobutyric Acid
  SITE 13: note = alpha-methyl-leucine
  SITE 17: note = Lysine is chemically modified through conjugation of the epsilon-amino group of the Lysine side chain with (2-[2-(2-Amino-ethoxy)-ethoxy]-acetyl)-(gamma-Glu)-CO-(CH2) 16-CO2H
  SITE 20: note = 2-Aminoisobutyric Acid
  SITE 41: note = Amidated residue
YXQGTFTSDFSKXLDKKAQXQFIEYLLEGGPSSGAPPPSEG

SEQ ID NO: 58 - protein, 41 aa, synthetic construct
  SITE 2: note = 2-Aminoisobutyric Acid
  SITE 13: note = alpha-methyl-leucine
  SITE 17: note = Lysine is chemically modified through conjugation of the epsilon-amino group of the Lysine side chain with (2-[2-(2-Amino-ethoxy)-ethoxy]-acetyl)-(gamma-Glu)-CO-(CH2) 18-CO2H
  SITE 20: note = 2-Aminoisobutyric Acid
  SITE 39: note = gamma-Glutamic Acid
  SITE 41: note = Amidated residue
YXQGTFTSDFSKXLDKKAQXAFIEYLLEGGPSSGAPPPXEG

SEQ ID NO: 59 - protein, 41 aa, synthetic construct
  SITE 2: note = 2-Aminoisobutyric Acid
  SITE 13: note = alpha-methyl-leucine
  SITE 17: note = Lysine is chemically modified through conjugation of the epsilon-amino group of the Lysine side chain with (2-[2-(2-Amino-ethoxy)-ethoxy]-acetyl)-(gamma-Glu)-CO-(CH2) 18-CO2H
  SITE 20: note = 2-Aminoisobutyric Acid
  SITE 39: note = gamma-Glutamic Acid
  SITE 41: note = Amidated residue
YXQGTFTSDFSKXLDKKAQXAFIEYLLEGGPSSGAPPPXGE

SEQ ID NO: 60 - protein, 42 aa, synthetic construct
  SITE 2: note = 2-Aminoisobutyric Acid
  SITE 13: note = alpha-methyl-leucine
  SITE 17: note = Lysine is chemically modified through conjugation of the epsilon-amino group of the Lysine side chain with (2-[2-(2-Amino-ethoxy)-ethoxy]-acetyl)-(gamma-Glu)-CO-(CH2) 18-CO2H
  SITE 20: note = 2-Aminoisobutyric Acid
  SITE 42: note = 2-[2-(2-Amino-ethoxy)-ethoxy]-acetic amide
YXQGTFTSDFSKXLDKKAQXAFIEYLLEGGPSSGEPPPGEGX

SEQ ID NO: 61 - protein, 41 aa, synthetic construct
  SITE 2: note = 2-Aminoisobutyric Acid
  SITE 13: note = alpha-methyl-leucine
  SITE 17: note = Lysine is chemically modified through conjugation of the epsilon-amino group of the Lysine side chain with (2-[2-(2-Amino-ethoxy)-ethoxy]-acetyl)2-(gamma-Glu)-CO-(CH2 )18-CO2H
  SITE 20: note = 2-Aminoisobutyric Acid
  SITE 29: note = 2-Aminoisobutyric Acid
  SITE 41: note = Amidated residue
YXQGTFTSDFSKXLDKKAQXAFIEYLLEXGPSSGAPPPGEG

SEQ ID NO: 62 - protein, 42 aa, synthetic construct
  SITE 2: note = 2-Aminoisobutyric Acid
  SITE 13: note = alpha-methyl-leucine
  SITE 17: note = Lysine is chemically modified through conjugation of the epsilon-amino group of the Lysine side chain with (2-[2-(2-Amino-ethoxy)-ethoxy]-acetyl)-(gamma-Glu)-CO-(CH2) 16-CO2H
  SITE 20: note = 2-Aminoisobutyric Acid
  SITE 42: note = 2-[2-(2-Amino-ethoxy)-ethoxy]-acetic amide
YXQGTFTSDFSKXLDKKAQXAFIEYLLEGGPSSGAPPPSEGX

SEQ ID NO: 63 - protein, 41 aa, synthetic construct
  SITE 2: note = 2-Aminoisobutyric Acid
  SITE 13: note = alpha-methyl-leucine
  SITE 17: note = Lysine is chemically modified through conjugation of the epsilon-amino group of the Lysine side chain with (2-[2-(2-Amino-ethoxy)-ethoxy]-acetyl)-(gamma-Glu)-CO-(CH2) 16-CO2H
  SITE 20: note = 2-Aminoisobutyric Acid
  SITE 29: note = 2-Aminoisobutyric Acid
  SITE 41: note = Amidated residue
YXQGTFTSDFSKXLDKKAQXAFIEYLLEXGPSSGAPPPSEG

SEQ ID NO: 64 - protein, 41 aa, synthetic construct; identical to SEQ ID NO: 54
  SITE 2: note = 2-Aminoisobutyric Acid
  SITE 13: note = alpha-methyl-leucine
  SITE 17: note = Lysine is chemically modified through conjugation of the epsilon-amino group of the Lysine side chain with (gamma-Glu)2-CO-(CH2)16-CO2H
  SITE 20: note = 2-Aminoisobutyric Acid
  SITE 41: note = Amidated residue

SEQ ID NO: 65 - protein, 41 aa, synthetic construct
  SITE 2: note = 2-Aminoisobutyric Acid
  SITE 12: note = L-ornithine
  SITE 13: note = alpha-methyl-leucine
  SITE 17: note = Lysine is chemically modified through conjugation of the epsilon-amino group of the Lysine side chain with (2-[2-(2-Amino-ethoxy)-ethoxy]-acetyl)-(gamma-Glu)-CO-(CH2) 18-CO2H
  SITE 20: note = 2-Aminoisobutyric Acid
  SITE 41: note = Amidated residue
YXQGTFTSDFSXXLDKKAQXAFIEYLLEGGPSSGEPPPSEG

SEQ ID NO: 66 - protein, 41 aa, synthetic construct
  SITE 2: note = 2-Aminoisobutyric Acid
  SITE 12: note = L-ornithine
  SITE 13: note = alpha-methyl-leucine
  SITE 17: note = Lysine is chemically modified through conjugation of the epsilon-amino group of the Lysine side chain with (2-[2-(2-Amino-ethoxy)-ethoxy]-acetyl)-(gamma-Glu)-CO-(CH2) 18-CO2H
  SITE 20: note = 2-Aminoisobutyric Acid
  SITE 41: note = Amidated residue
YXQGTFTSDFSXXLDKKAQXAFIEYLLAGGPSSGAPPPSEG

SEQ ID NO: 67 - protein, 41 aa, synthetic construct
  SITE 2: note = 2-Aminoisobutyric Acid
  SITE 12: note = L-ornithine
  SITE 13: note = alpha-methyl-leucine
  SITE 17: note = Lysine is chemically modified through conjugation of the epsilon-amino group of the Lysine side chain with (2-[2-(2-Amino-ethoxy)-ethoxy]-acetyl)-(gamma-Glu)-CO-(CH2) 18-CO2H
  SITE 20: note = 2-Aminoisobutyric Acid
  SITE 29: note = 2-Aminoisobutyric Acid
  SITE 41: note = Amidated residue
YXQGTFTSDFSXXLDKKAQXAFIEYLLEXGPSSGAPPPSEG

SEQ ID NO: 68 - protein, 41 aa, synthetic construct
  SITE 2: note = 2-Aminoisobutyric Acid
  SITE 12: note = L-ornithine
  SITE 13: note = alpha-methyl-leucine
  SITE 17: note = Lysine is chemically modified through conjugation of the epsilon-amino group of the Lysine side chain with (2-[2-(2-Amino-ethoxy)-ethoxy]-acetyl)-(gamma-Glu)-CO-(CH2) 16-CO2H
  SITE 20: note = 2-Aminoisobutyric Acid
  SITE 41: note = Amidated residue
YXQGTFTSDFSXXLDKKAQXAFIEYLLEGGPSSGAPPPGGS

SEQ ID NO: 69 - protein, 41 aa, synthetic construct
  SITE 2: note = 2-Aminoisobutyric Acid
  SITE 12: note = L-ornithine
  SITE 13: note = alpha-methyl-leucine
  SITE 17: note = Lysine is chemically modified through conjugation of the epsilon-amino group of the Lysine side chain with (2-[2-(2-Amino-ethoxy)-ethoxy]-acetyl)-(gamma-Glu)-CO-(CH2) 16-CO2H
  SITE 20: note = 2-Aminoisobutyric Acid
  SITE 41: note = Amidated residue
YXQGTFTSDFSXXLDKKAQXAFIEYLLEGGPSSGAPPPGGE

SEQ ID NO: 70 - protein, 42 aa, synthetic construct
  SITE 2: note = 2-Aminoisobutyric Acid
  SITE 12: note = L-ornithine
  SITE 13: note = alpha-methyl-leucine
  SITE 17: note = Lysine is chemically modified through conjugation of the epsilon-amino group of the Lysine side chain with (2-[2-(2-Amino-ethoxy)-ethoxy]-acetyl)-(gamma-Glu)-CO-(CH2) 16-CO2H
  SITE 20: note = 2-Aminoisobutyric Acid
  SITE 42: note = Amidated residue
YXQGTFTSDFSXXLDKKAQXAFIEYLLEGGPSSGAPPPGGSG

SEQ ID NO: 71 - protein, 42 aa, synthetic construct
  SITE 2: note = 2-Aminoisobutyric Acid
  SITE 12: note = L-ornithine
  SITE 13: note = alpha-methyl-leucine
  SITE 17: note = Lysine is chemically modified through conjugation of the epsilon-amino group of the Lysine side chain with (2-[2-(2-Amino-ethoxy)-ethoxy]-acetyl)-(gamma-Glu)-CO-(CH2) 16-CO2H
  SITE 20: note = 2-Aminoisobutyric Acid
  SITE 42: note = Amidated residue
YXQGTFTSDFSXXLDKKAQXAFIEYLLEGGPSSGAPPPGGSE

SEQ ID NO: 72 - protein, 42 aa, synthetic construct
  SITE 2: note = 2-Aminoisobutyric Acid
  SITE 12: note = L-ornithine
  SITE 13: note = alpha-methyl-leucine
  SITE 17: note = Lysine is chemically modified through conjugation of the epsilon-amino group of the Lysine side chain with (2-[2-(2-Amino-ethoxy)-ethoxy]-acetyl)-(gamma-Glu)-CO-(CH2) 16-CO2H
  SITE 20: note = 2-Aminoisobutyric Acid
  SITE 42: note = 2-[2-(2-Amino-ethoxy)-ethoxy]-acetic amide
YXQGTFTSDFSXXLDKKAQXAFIEYLLEGGPSSGAPPPGGSX

SEQ ID NO: 73 - protein, 41 aa, synthetic construct; identical to SEQ ID NO: 68
  SITE 2: note = 2-Aminoisobutyric Acid
  SITE 12: note = (S)-2,4-diaminobutanoic acid
  SITE 13: note = alpha-methyl-leucine
  SITE 17: note = Lysine is chemically modified through conjugation of the epsilon-amino group of the Lysine side chain with (2-[2-(2-Amino-ethoxy)-ethoxy]-acetyl)-(gamma-Glu)-CO-(CH2) 16-CO2H
  SITE 20: note = 2-Aminoisobutyric Acid
  SITE 41: note = Amidated residue

SEQ ID NO: 74 - protein, 41 aa, synthetic construct; identical to SEQ ID NO: 68
  SITE 2: note = 2-Aminoisobutyric Acid
  SITE 12: note = (S)-2,3-diaminopropanoic acid
  SITE 13: note = alpha-methyl-leucine
  SITE 17: note = Lysine is chemically modified through conjugation of the epsilon-amino group of the Lysine side chain with (2-[2-(2-Amino-ethoxy)-ethoxy]-acetyl)-(gamma-Glu)-CO-(CH2) 16-CO2H
  SITE 20: note = 2-Aminoisobutyric Acid
  SITE 41: note = Amidated residue

SEQ ID NO: 75 - protein, 41 aa, synthetic construct
  SITE 2: note = 2-Aminoisobutyric Acid
  SITE 12: note = L-ornithine
  SITE 13: note = alpha-methyl-leucine
  SITE 17: note = Lysine is chemically modified through conjugation of the epsilon-amino group of the Lysine side chain with (2-[2-(2-Amino-ethoxy)-ethoxy]-acetyl)2-(gamma-Glu)-CO-(CH2 )18-CO2H
  SITE 20: note = 2-Aminoisobutyric Acid
  SITE 29: note = 2-Aminoisobutyric Acid
  SITE 41: note = Amidated residue
YXQGTFTSDFSXXLDKKAQXAFIEYLLEXGPSSGEPPPGEG

SEQ ID NO: 76 - protein, 41 aa, synthetic construct
  SITE 2: note = 2-Aminoisobutyric Acid
  SITE 12: note = L-ornithine
  SITE 13: note = alpha-methyl-leucine
  SITE 17: note = Lysine is chemically modified through conjugation of the epsilon-amino group of the Lysine side chain with (2-[2-(2-Amino-ethoxy)-ethoxy]-acetyl)2-(gamma-Glu)-CO-(CH2 )18-CO2H
  SITE 20: note = 2-Aminoisobutyric Acid
  SITE 29: note = 2-Aminoisobutyric Acid
  SITE 41: note = Amidated residue
YXQGTFTSDFSXXLDKKAQXAFIEYLLEXGPSSGAPPPGEG

SEQ ID NO: 77 - protein, 41 aa, synthetic construct; identical to SEQ ID NO: 67
  SITE 2: note = 2-Aminoisobutyric Acid
  SITE 12: note = L-ornithine
  SITE 13: note = alpha-methyl-leucine
  SITE 17: note = Lysine is chemically modified through conjugation of the epsilon-amino group of the Lysine side chain with (2-[2-(2-Amino-ethoxy)-ethoxy]-acetyl)2-(gamma-Glu)-CO-(CH2 )18-CO2H
  SITE 20: note = 2-Aminoisobutyric Acid
  SITE 29: note = 2-Aminoisobutyric Acid
  SITE 41: note = Amidated residue

SEQ ID NO: 78 - protein, 41 aa, synthetic construct
  SITE 2: note = 2-Aminoisobutyric Acid
  SITE 12: note = L-ornithine
  SITE 13: note = alpha-methyl-leucine
  SITE 17: note = Lysine is chemically modified through conjugation of the epsilon-amino group of the Lysine side chain with (2-[2-(2-Amino-ethoxy)-ethoxy]-acetyl)2-(gamma-Glu)-CO-(CH2 )18-CO2H
  SITE 20: note = 2-Aminoisobutyric Acid
  SITE 29: note = D-amino acid
YXQGTFTSDFSXXLDKKAQXAFIEYLLEAGPSSGAPPPSEG

SEQ ID NO: 79 - protein, 41 aa, synthetic construct
  SITE 2: note = 2-Aminoisobutyric Acid
  SITE 12: note = L-ornithine
  SITE 13: note = alpha-methyl-leucine
  SITE 17: note = Lysine is chemically modified through conjugation of the epsilon-amino group of the Lysine side chain with (2-[2-(2-Amino-ethoxy)-ethoxy]-acetyl)-(gamma-Glu)-CO-(CH2) 18-CO2H
  SITE 20: note = 2-Aminoisobutyric Acid
  SITE 29: note = 2-Aminoisobutyric Acid
  SITE 41: note = Amidated residue
YXQGTFTSDFSXXLDKKAQXAFIEYLLEXGPSSGAPPPSGS

SEQ ID NO: 80 - protein, 41 aa, synthetic construct; identical to SEQ ID NO: 79
  SITE 2: note = 2-Aminoisobutyric Acid
  SITE 12: note = L-ornithine
  SITE 13: note = alpha-methyl-leucine
  SITE 17: note = Lysine is chemically modified through conjugation of the epsilon-amino group of the Lysine side chain with (2-[2-(2-Amino-ethoxy)-ethoxy]-acetyl)-(gamma-Glu)-CO-(CH2) 16-CO2H
  SITE 20: note = 2-Aminoisobutyric Acid
  SITE 29: note = 2-Aminoisobutyric Acid
  SITE 41: note = Amidated residue

SEQ ID NO: 81 - protein, 41 aa, synthetic construct; identical to SEQ ID NO: 79
  SITE 2: note = 2-Aminoisobutyric Acid
  SITE 12: note = L-ornithine
  SITE 13: note = alpha-methyl-leucine
  SITE 17: note = Lysine is chemically modified through conjugation of the epsilon-amino group of the Lysine side chain with (2-[2-(2-Amino-ethoxy)-ethoxy]-acetyl)2-(gamma-Glu)-CO-(CH2 )16-CO2H
  SITE 20: note = 2-Aminoisobutyric Acid
  SITE 29: note = 2-Aminoisobutyric Acid
  SITE 41: note = Amidated residue

SEQ ID NO: 82 - protein, 41 aa, synthetic construct
  SITE 2: note = 2-Aminoisobutyric Acid
  SITE 12: note = L-ornithine
  SITE 13: note = alpha-methyl-leucine
  SITE 17: note = Lysine is chemically modified through conjugation of the epsilon-amino group of the Lysine side chain with (2-[2-(2-Amino-ethoxy)-ethoxy]-acetyl)-(gamma-Glu)-CO-(CH2) 18-CO2H
  SITE 20: note = 2-Aminoisobutyric Acid
  SITE 41: note = Amidated residue
YXQGTFTSDFSXXLDKKAQXAFIEYLLAGGPSSGAPPPSGS

SEQ ID NO: 83 - protein, 41 aa, synthetic construct
  SITE 2: note = 2-Aminoisobutyric Acid
  SITE 13: note = alpha-methyl-leucine
  SITE 17: note = Lysine is chemically modified through conjugation of the epsilon-amino group of the Lysine side chain with (2-[2-(2-Amino-ethoxy)-ethoxy]-acetyl)-(gamma-Glu)-CO-(CH2) 18-CO2H
  SITE 20: note = 2-Aminoisobutyric Acid
  SITE 41: note = Amidated residue
YXQGTFTSDFSRXLDKKAQXAFIEYLLAGGPSSGAPPPSGS

SEQ ID NO: 84 - protein, 41 aa, synthetic construct
  SITE 2: note = 2-Aminoisobutyric Acid
  SITE 12: note = L-ornithine
  SITE 13: note = alpha-methyl-leucine
  SITE 17: note = Lysine is chemically modified through conjugation of the epsilon-amino group of the Lysine side chain with (2-[2-(2-Amino-ethoxy)-ethoxy]-acetyl)-(gamma-Glu)-CO-(CH2) 18-CO2H
  SITE 20: note = 2-Aminoisobutyric Acid
  SITE 41: note = Amidated residue
YXQGTFTSDFSXXLDKKAQXAFIEWLLEGGPSSGAPPPSGS

SEQ ID NO: 85 - protein, 41 aa, synthetic construct
  SITE 2: note = 2-Aminoisobutyric Acid
  SITE 13: note = alpha-methyl-leucine
  SITE 17: note = Lysine is chemically modified through conjugation of the epsilon-amino group of the Lysine side chain with (2-[2-(2-Amino-ethoxy)-ethoxy]-acetyl)-(gamma-Glu)-CO-(CH2) 16-CO2H
  SITE 20: note = 2-Aminoisobutyric Acid
  SITE 29: note = 2-Aminoisobutyric Acid
  SITE 41: note = Amidated residue
YXQGTFTSDFSRXLDKKAQXAFIEYLLEXGPSSGAPPPSGS

SEQ ID NO: 86 - protein, 41 aa, synthetic construct; identical to SEQ ID NO: 85
  SITE 2: note = 2-Aminoisobutyric Acid
  SITE 13: note = alpha-methyl-leucine
  SITE 17: note = Lysine is chemically modified through conjugation of the epsilon-amino group of the Lysine side chain with (2-[2-(2-Amino-ethoxy)-ethoxy]-acetyl)2-(gamma-Glu)-CO-(CH2 )16-CO2H
  SITE 20: note = 2-Aminoisobutyric Acid
  SITE 29: note = 2-Aminoisobutyric Acid
  SITE 41: note = Amidated residue

SEQ ID NO: 87 - protein, 41 aa, synthetic construct
  SITE 2: note = 2-Aminoisobutyric Acid
  SITE 12: note = L-ornithine
  SITE 13: note = alpha-methyl-leucine
  SITE 17: note = Lysine is chemically modified through conjugation of the epsilon-amino group of the Lysine side chain with (2-[2-(2-Amino-ethoxy)-ethoxy]-acetyl)-(gamma-Glu)-CO-(CH2) 18-CO2H
  SITE 20: note = 2-Aminoisobutyric Acid
  SITE 41: note = Amidated residue
YXQGTFTSDFSXXLDKKAQXAFIEYLLAGGPSSGAPPPSGD

SEQ ID NO: 88 - protein, 41 aa, synthetic construct
  SITE 2: note = 2-Aminoisobutyric Acid
  SITE 12: note = L-ornithine
  SITE 13: note = alpha-methyl-leucine
  SITE 17: note = Lysine is chemically modified through conjugation of the epsilon-amino group of the Lysine side chain with (2-[2-(2-Amino-ethoxy)-ethoxy]-acetyl)-(gamma-Glu)-CO-(CH2) 18-CO2H
  SITE 20: note = 2-Aminoisobutyric Acid
  SITE 41: note = Amidated residue
YXQGTFTSDFSXXLDKKAQXAFIEYLLAGGPSSGAPPPSGE

SEQ ID NO: 89 - protein, 42 aa, synthetic construct
  SITE 2: note = 2-Aminoisobutyric Acid
  SITE 12: note = L-ornithine
  SITE 13: note = alpha-methyl-leucine
  SITE 17: note = Lysine is chemically modified through conjugation of the epsilon-amino group of the Lysine side chain with (2-[2-(2-Amino-ethoxy)-ethoxy]-acetyl)-(gamma-Glu)-CO-(CH2) 18-CO2H
  SITE 20: note = 2-Aminoisobutyric Acid
  SITE 42: note = 2-[2-(2-Amino-ethoxy)-ethoxy]-acetic amide
YXQGTFTSDFSXXLDKKAQXAFIEYLLAGGPSSGAPPPSGSX

SEQ ID NO: 90 - protein, 42 aa, synthetic construct
  SITE 2: note = 2-Aminoisobutyric Acid
  SITE 12: note = L-ornithine
  SITE 13: note = alpha-methyl-leucine
  SITE 17: note = Lysine is chemically modified through conjugation of the epsilon-amino group of the Lysine side chain with (2-[2-(2-Amino-ethoxy)-ethoxy]-acetyl)-(gamma-Glu)-CO-(CH2) 18-CO2H
  SITE 20: note = 2-Aminoisobutyric Acid
  SITE 42: note = Amidated residue
YXQGTFTSDFSXXLDKKAQXAFIEYLLAGGPSSGAPPPSGSE

SEQ ID NO: 91 - protein, 41 aa, synthetic construct; identical to SEQ ID NO: 87
  SITE 2: note = 2-Aminoisobutyric Acid
  SITE 12: note = L-ornithine
  SITE 13: note = alpha-methyl-leucine
  SITE 17: note = Lysine is chemically modified through conjugation of the epsilon-amino group of the Lysine side chain with (2-[2-(2-Amino-ethoxy)-ethoxy]-acetyl)-(gamma-Glu)-CO-(CH2) 16-CO2H
  SITE 20: note = 2-Aminoisobutyric Acid
  SITE 41: note = Amidated residue

SEQ ID NO: 92 - protein, 41 aa, synthetic construct; identical to SEQ ID NO: 88
  SITE 2: note = 2-Aminoisobutyric Acid
  SITE 12: note = L-ornithine
  SITE 13: note = alpha-methyl-leucine
  SITE 17: note = Lysine is chemically modified through conjugation of the epsilon-amino group of the Lysine side chain with (2-[2-(2-Amino-ethoxy)-ethoxy]-acetyl)-(gamma-Glu)-CO-(CH2) 16-CO2H
  SITE 20: note = 2-Aminoisobutyric Acid
  SITE 41: note = Amidated residue

SEQ ID NO: 93 - protein, 41 aa, synthetic construct
  SITE 2: note = 2-Aminoisobutyric Acid
  SITE 12: note = L-ornithine
  SITE 13: note = alpha-methyl-leucine
  SITE 17: note = Lysine is chemically modified through conjugation of the epsilon-amino group of the Lysine side chain with (2-[2-(2-Amino-ethoxy)-ethoxy]-acetyl)-(gamma-Glu)-CO-(CH2) 16-CO2H
  SITE 20: note = 2-Aminoisobutyric Acid
  SITE 41: note = Amidated residue
YXQGTFTSDFSXXLDKKAQXAFIEYLLAGGPSSGAPPPSGT

SEQ ID NO: 94 - protein, 42 aa, synthetic construct; identical to SEQ ID NO: 89
  SITE 2: note = 2-Aminoisobutyric Acid
  SITE 12: note = L-ornithine
  SITE 13: note = alpha-methyl-leucine
  SITE 17: note = Lysine is chemically modified through conjugation of the epsilon-amino group of the Lysine side chain with (2-[2-(2-Amino-ethoxy)-ethoxy]-acetyl)-(gamma-Glu)-CO-(CH2) 16-CO2H
  SITE 20: note = 2-Aminoisobutyric Acid
  SITE 42: note = amidated gamma-Glutamic Acid

SEQ ID NO: 95 - protein, 42 aa, synthetic construct; identical to SEQ ID NO: 89
  SITE 2: note = 2-Aminoisobutyric Acid
  SITE 12: note = L-ornithine
  SITE 13: note = alpha-methyl-leucine
  SITE 17: note = Lysine is chemically modified through conjugation of the epsilon-amino group of the Lysine side chain with (2-[2-(2-Amino-ethoxy)-ethoxy]-acetyl)-(gamma-Glu)-CO-(CH2) 16-CO2H
  SITE 20: note = 2-Aminoisobutyric Acid
  SITE 42: note = 2-[2-(2-Amino-ethoxy)-ethoxy]-acetic amide

SEQ ID NO: 96 - protein, 42 aa, synthetic construct; identical to SEQ ID NO: 90
  SITE 2: note = 2-Aminoisobutyric Acid
  SITE 12: note = L-ornithine
  SITE 13: note = alpha-methyl-leucine
  SITE 17: note = Lysine is chemically modified through conjugation of the epsilon-amino group of the Lysine side chain with (2-[2-(2-Amino-ethoxy)-ethoxy]-acetyl)-(gamma-Glu)-CO-(CH2) 16-CO2H
  SITE 20: note = 2-Aminoisobutyric Acid
  SITE 42: note = Amidated residue

SEQ ID NO: 97 - protein, 42 aa, synthetic construct
  SITE 2: note = 2-Aminoisobutyric Acid
  SITE 12: note = L-ornithine
  SITE 13: note = alpha-methyl-leucine
  SITE 17: note = Lysine is chemically modified through conjugation of the epsilon-amino group of the Lysine side chain with (2-[2-(2-Amino-ethoxy)-ethoxy]-acetyl)-(gamma-Glu)-CO-(CH2) 16-CO2H
  SITE 20: note = 2-Aminoisobutyric Acid
  SITE 42: note = 2-[2-(2-Amino-ethoxy)-ethoxy]-acetic amide
YXQGTFTSDFSXXLDKKAQXAFIEYLLAGGPSSGAPPPSGEX

SEQ ID NO: 98 - protein, 41 aa, synthetic construct
  SITE 2: note = 2-Aminoisobutyric Acid
  SITE 12: note = L-ornithine
  SITE 13: note = alpha-methyl-leucine
  SITE 17: note = Lysine is chemically modified through conjugation of the epsilon-amino group of the Lysine side chain with (2-[2-(2-Amino-ethoxy)-ethoxy]-acetyl)-(gamma-Glu)-CO-(CH2) 18-CO2H
  SITE 20: note = 2-Aminoisobutyric Acid
  SITE 41: note = Amidated residue
YXQGTFTSDFSXXLDKKAQXAFIEYLLAGGPSSGEPPPSGS

SEQ ID NO: 99 - protein, 41 aa, synthetic construct
  SITE 2: note = 2-Aminoisobutyric Acid
  SITE 12: note = L-ornithine
  SITE 13: note = alpha-methyl-leucine
  SITE 17: note = Lysine is chemically modified through conjugation of the epsilon-amino group of the Lysine side chain with (2-[2-(2-Amino-ethoxy)-ethoxy]-acetyl)-(gamma-Glu)-CO-(CH2) 16-CO2H
  SITE 20: note = 2-Aminoisobutyric Acid
  SITE 41: note = Amidated residue
YXQGTFTSDFSXXLDKKAQXAFIEYLLAGGPSSGAPPPEGS

SEQ ID NO: 100 - protein, 41 aa, synthetic construct; identical to SEQ ID NO: 98
  SITE 2: note = 2-Aminoisobutyric Acid
  SITE 12: note = L-ornithine
  SITE 13: note = alpha-methyl-leucine
  SITE 17: note = Lysine is chemically modified through conjugation of the epsilon-amino group of the Lysine side chain with (2-[2-(2-Amino-ethoxy)-ethoxy]-acetyl)-(gamma-Glu)-CO-(CH2) 16-CO2H
  SITE 20: note = 2-Aminoisobutyric Acid
  SITE 41: note = Amidated residue

SEQ ID NO: 101 - protein, 41 aa, synthetic construct; identical to SEQ ID NO: 82
  SITE 2: note = 2-Aminoisobutyric Acid
  SITE 12: note = L-ornithine
  SITE 13: note = alpha-methyl-leucine
  SITE 17: note = Lysine is chemically modified through conjugation of the epsilon-amino group of the Lysine side chain with (2-[2-(2-Amino-ethoxy)-ethoxy]-acetyl)-(gamma-Glu)-CO-(CH2) 16-CO2H
  SITE 20: note = 2-Aminoisobutyric Acid
  SITE 41: note = Amidated residue

SEQ ID NO: 102 - protein, 41 aa, synthetic construct
  SITE 2: note = 2-Aminoisobutyric Acid
  SITE 12: note = L-ornithine
  SITE 13: note = alpha-methyl-leucine
  SITE 17: note = Lysine is chemically modified through conjugation of the epsilon-amino group of the Lysine side chain with (2-[2-(2-Amino-ethoxy)-ethoxy]-acetyl)-(gamma-Glu)-CO-(CH2) 16-CO2H
  SITE 20: note = 2-Aminoisobutyric Acid
  SITE 41: note = Amidated residue
YXQGTFTSDFSXXLDKKAQXQFIEYLLAGGPSSGAPPPEGS

SEQ ID NO: 103 - protein, 41 aa, synthetic construct
  SITE 2: note = 2-Aminoisobutyric Acid
  SITE 12: note = L-ornithine
  SITE 13: note = alpha-methyl-leucine
  SITE 17: note = Lysine is chemically modified through conjugation of the epsilon-amino group of the Lysine side chain with (2-[2-(2-Amino-ethoxy)-ethoxy]-acetyl)-(gamma-Glu)-CO-(CH2) 16-CO2H
  SITE 20: note = 2-Aminoisobutyric Acid
  SITE 41: note = Amidated residue
YXQGTFTSDFSXXLDKKAQXAFIEYLLAGGPSSGEPPPSGE

SEQ ID NO: 104 - protein, 41 aa, synthetic construct
  SITE 2: note = 2-Aminoisobutyric Acid
  SITE 12: note = L-ornithine
  SITE 13: note = alpha-methyl-leucine
  SITE 17: note = Lysine is chemically modified through conjugation of the epsilon-amino group of the Lysine side chain with (2-[2-(2-Amino-ethoxy)-ethoxy]-acetyl)-(gamma-Glu)-CO-(CH2) 16-CO2H
  SITE 20: note = 2-Aminoisobutyric Acid
  SITE 41: note = Amidated residue
YXQGTFTSDFSXXLDKKAQXAFIEYLLAGGPSSGEPPPEGE

SEQ ID NO: 105 - protein, 41 aa, synthetic construct
  SITE 2: note = 2-Aminoisobutyric Acid
  SITE 12: note = L-ornithine
  SITE 13: note = alpha-methyl-leucine
  SITE 17: note = Lysine is chemically modified through conjugation of the epsilon-amino group of the Lysine side chain with (2-[2-(2-Amino-ethoxy)-ethoxy]-acetyl)-(gamma-Glu)-CO-(CH2) 16-CO2H
  SITE 20: note = 2-Aminoisobutyric Acid
  SITE 41: note = Amidated residue
YXQGTFTSDFSXXLDKKAQXAFIEYLLAGGPSSGAPPPEGE

SEQ ID NO: 106 - protein, 41 aa, synthetic construct
  SITE 2: note = 2-Aminoisobutyric Acid
  SITE 12: note = L-ornithine
  SITE 13: note = alpha-methyl-leucine
  SITE 17: note = Lysine is chemically modified through conjugation of the epsilon-amino group of the Lysine side chain with (2-[2-(2-Amino-ethoxy)-ethoxy]-acetyl)-(gamma-Glu)-CO-(CH2) 18-CO2H
  SITE 20: note = 2-Aminoisobutyric Acid
  SITE 41: note = Amidated residue
YXQGTFTSDFSXXLDKKAQXAFIEWLLEGGPSSGAPPPSGE

SEQ ID NO: 107 - protein, 41 aa, synthetic construct
  SITE 2: note = 2-Aminoisobutyric Acid
  SITE 12: note = L-ornithine
  SITE 13: note = alpha-methyl-leucine
  SITE 17: note = Lysine is chemically modified through conjugation of the epsilon-amino group of the Lysine side chain with (2-[2-(2-Amino-ethoxy)-ethoxy]-acetyl)-(gamma-Glu)-CO-(CH2) 18-CO2H
  SITE 20: note = 2-Aminoisobutyric Acid
  SITE 41: note = Amidated residue
YXQGTFTSDFSXXLDKKAQXAFIEWLLEGGPSSGAPPPEGE

SEQ ID NO: 108 - protein, 41 aa, synthetic construct; identical to SEQ ID NO: 104
  SITE 2: note = 2-Aminoisobutyric Acid
  SITE 12: note = L-ornithine
  SITE 13: note = alpha-methyl-leucine
  SITE 17: note = Lysine is chemically modified through conjugation of the epsilon-amino group of the Lysine side chain with (2-[2-(2-Amino-ethoxy)-ethoxy]-acetyl)-(gamma-Glu)-CO-(CH2) 18-CO2H
  SITE 20: note = 2-Aminoisobutyric Acid
  SITE 41: note = Amidated residue

SEQ ID NO: 109 - protein, 41 aa, synthetic construct
  SITE 2: note = 2-Aminoisobutyric Acid
  SITE 12: note = L-ornithine
  SITE 13: note = alpha-methyl-leucine
  SITE 17: note = Lysine is chemically modified through conjugation of the epsilon-amino group of the Lysine side chain with (2-[2-(2-Amino-ethoxy)-ethoxy]-acetyl)-(gamma-Glu)-CO-(CH2) 18-CO2H
  SITE 20: note = 2-Aminoisobutyric Acid
  SITE 41: note = Amidated residue
YXQGTFTSDFSXXLDKKAQXAFIEWLLAGGPSSGEPPPSGE

SEQ ID NO: 110 - protein, 41 aa, synthetic construct
  SITE 2: note = 2-Aminoisobutyric Acid
  SITE 12: note = L-ornithine
  SITE 13: note = alpha-methyl-leucine
  SITE 17: note = Lysine is chemically modified through conjugation of the epsilon-amino group of the Lysine side chain with (2-[2-(2-Amino-ethoxy)-ethoxy]-acetyl)-(gamma-Glu)-CO-(CH2) 18-CO2H
  SITE 20: note = 2-Aminoisobutyric Acid
  SITE 31: note = Hydroxy-L-proline
  SITE 41: note = Amidated residue
YXQGTFTSDFSXXLDKKAQXAFIEWLLEGGXSSGAPPPSGE

SEQ ID NO: 111 - protein, 41 aa, synthetic construct
  SITE 2: note = 2-Aminoisobutyric Acid
  SITE 12: note = L-ornithine
  SITE 13: note = alpha-methyl-leucine
  SITE 17: note = Lysine is chemically modified through conjugation of the epsilon-amino group of the Lysine side chain with (2-[2-(2-Amino-ethoxy)-ethoxy]-acetyl)-(gamma-Glu)-CO-(CH2) 18-CO2H
  SITE 20: note = 2-Aminoisobutyric Acid
  SITE 38: note = Hydroxy-L-proline
  SITE 41: note = Amidated residue
YXQGTFTSDFSXXLDKKAQXAFIEWLLEGGPSSGAPPXSGE

SEQ ID NO: 112 - protein, 41 aa, synthetic construct
  SITE 2: note = 2-Aminoisobutyric Acid
  SITE 12: note = L-ornithine
  SITE 13: note = alpha-methyl-leucine
  SITE 17: note = Lysine is chemically modified through conjugation of the epsilon-amino group of the Lysine side chain with (2-[2-(2-Amino-ethoxy)-ethoxy]-acetyl)-(gamma-Glu)-CO-(CH2) 18-CO2H
  SITE 20: note = 2-Aminoisobutyric Acid
  SITE 41: note = Amidated residue
YXQGTFTSDFSXXLDKKAQXAFIEYLLAGGTSSGEPPPSGE

SEQ ID NO: 113 - protein, 41 aa, synthetic construct
  SITE 2: note = 2-Aminoisobutyric Acid
  SITE 12: note = L-ornithine
  SITE 13: note = alpha-methyl-leucine
  SITE 17: note = Lysine is chemically modified through conjugation of the epsilon-amino group of the Lysine side chain with (2-[2-(2-Amino-ethoxy)-ethoxy]-acetyl)2-(gamma-Glu)-CO-(CH2 )16-CO2H
  SITE 20: note = 2-Aminoisobutyric Acid
  SITE 41: note = Amidated residue
YXQGTFTSDFSXXLDKKAQXAFIEYLLEGGPSSGAPPPSGE

SEQ ID NO: 114 - protein, 41 aa, synthetic construct
  SITE 2: note = 2-Aminoisobutyric Acid
  SITE 13: note = alpha-methyl-leucine
  SITE 17: note = Lysine is chemically modified through conjugation of the epsilon-amino group of the Lysine side chain with (2-[2-(2-Amino-ethoxy)-ethoxy]-acetyl)-(gamma-Glu)-CO-(CH2) 16-CO2H
  SITE 20: note = 2-Aminoisobutyric Acid
  SITE 41: note = Amidated residue
YXQGTFTSDFSRXLDKKAQXAFIEYLLEGGPSSGAPPPSGE

SEQ ID NO: 115 - protein, 41 aa, synthetic construct; identical to SEQ ID NO: 114
  SITE 2: note = 2-Aminoisobutyric Acid
  SITE 13: note = alpha-methyl-leucine
  SITE 17: note = Lysine is chemically modified through conjugation of the epsilon-amino group of the Lysine side chain with (2-[2-(2-Amino-ethoxy)-ethoxy]-acetyl)2-(gamma-Glu)-CO-(CH2 )16-CO2H
  SITE 20: note = 2-Aminoisobutyric Acid
  SITE 41: note = Amidated residue

SEQ ID NO: 116 - protein, 41 aa, synthetic construct
  SITE 2: note = 2-Aminoisobutyric Acid
  SITE 12: note = L-ornithine
  SITE 13: note = alpha-methyl-leucine
  SITE 17: note = Lysine is chemically modified through conjugation of the epsilon-amino group of the Lysine side chain with (2-[2-(2-Amino-ethoxy)-ethoxy]-acetyl)-(gamma-Glu)-CO-(CH2) 16-CO2H
  SITE 20: note = 2-Aminoisobutyric Acid
  SITE 29: note = 2-Aminoisobutyric Acid
  SITE 41: note = Amidated residue
YXQGTFTSDFSXXLDKKAQXAFIEYLLEXGPSSGAPPPSGE

SEQ ID NO: 117 - protein, 41 aa, synthetic construct; identical to SEQ ID NO: 116
  SITE 2: note = 2-Aminoisobutyric Acid
  SITE 12: note = L-ornithine
  SITE 13: note = alpha-methyl-leucine
  SITE 17: note = Lysine is chemically modified through conjugation of the epsilon-amino group of the Lysine side chain with (2-[2-(2-Amino-ethoxy)-ethoxy]-acetyl)2-(gamma-Glu)-CO-(CH2 )16-CO2H
  SITE 20: note = 2-Aminoisobutyric Acid
  SITE 29: note = 2-Aminoisobutyric Acid
  SITE 41: note = Amidated residue

SEQ ID NO: 118 - protein, 41 aa, synthetic construct
  SITE 2: note = 2-Aminoisobutyric Acid
  SITE 10: note = 3-(4-Pyridyl)-L-alanine
  SITE 12: note = L-ornithine
  SITE 13: note = alpha-methyl-leucine
  SITE 17: note = Lysine is chemically modified through conjugation of the epsilon-amino group of the Lysine side chain with (2-[2-(2-Amino-ethoxy)-ethoxy]-acetyl)-(gamma-Glu)-CO-(CH2) 16-CO2H
  SITE 20: note = 2-Aminoisobutyric Acid
  SITE 41: note = Amidated residue
YXQGTFTSDXSXXLDKKAQXAFIEYLLAGGPSSGAPPPSGE

SEQ ID NO: 119 - protein, 41 aa, synthetic construct
  SITE 2: note = 2-Aminoisobutyric Acid
  SITE 10: note = 3-(4-Pyridyl)-L-alanine
  SITE 13: note = alpha-methyl-leucine
  SITE 17: note = Lysine is chemically modified through conjugation of the epsilon-amino group of the Lysine side chain with (2-[2-(2-Amino-ethoxy)-ethoxy]-acetyl)-(gamma-Glu)-CO-(CH2) 16-CO2H
  SITE 20: note = 2-Aminoisobutyric Acid
  SITE 41: note = Amidated residue
YXQGTFTSDXSRXLDKKAQXAFIEYLLAGGPSSGAPPPSGE

SEQ ID NO: 120 - protein, 41 aa, synthetic construct
  SITE 2: note = 2-Aminoisobutyric Acid
  SITE 10: note = 3-(4-Pyridyl)-L-alanine
  SITE 13: note = alpha-methyl-leucine
  SITE 17: note = Lysine is chemically modified through conjugation of the epsilon-amino group of the Lysine side chain with (2-[2-(2-Amino-ethoxy)-ethoxy]-acetyl)-(gamma-Glu)-CO-(CH2) 16-CO2H
  SITE 20: note = 2-Aminoisobutyric Acid
  SITE 29: note = 2-Aminoisobutyric Acid
  SITE 41: note = Amidated residue
YXQGTFTSDXSRXLDKKAQXAFIEYLLEXGPSSGAPPPSGE

SEQ ID NO: 121 - protein, 41 aa, synthetic construct
  SITE 2: note = 2-Aminoisobutyric Acid
  SITE 10: note = 3-(4-Pyridyl)-L-alanine
  SITE 12: note = L-ornithine
  SITE 13: note = alpha-methyl-leucine
  SITE 17: note = Lysine is chemically modified through conjugation of the epsilon-amino group of the Lysine side chain with (2-[2-(2-Amino-ethoxy)-ethoxy]-acetyl)-(gamma-Glu)-CO-(CH2) 16-CO2H
  SITE 20: note = 2-Aminoisobutyric Acid
  SITE 41: note = Amidated residue
YXQGTFTSDXSXXLDKKAQXAFIEWLLEGGPSSGEPPPSGE

SEQ ID NO: 122 - protein, 41 aa, synthetic construct
  SITE 2: note = 2-Aminoisobutyric Acid
  SITE 12: note = L-ornithine
  SITE 13: note = alpha-methyl-leucine
  SITE 17: note = Lysine is chemically modified through conjugation of the epsilon-amino group of the Lysine side chain with (2-[2-(2-Amino-ethoxy)-ethoxy]-acetyl)2-(gamma-Glu)-CO-(CH2 )16-CO2H
  SITE 20: note = 2-Aminoisobutyric Acid
  SITE 29: note = D-amino acid
  SITE 41: note = Amidated residue
YXQGTFTSDFSXXLDKKAQXAFIEYLLEAGPSSGEPPPSEG

SEQ ID NO: 123 - protein, 41 aa, synthetic construct
  SITE 2: note = 2-Aminoisobutyric Acid
  SITE 12: note = L-ornithine
  SITE 13: note = alpha-methyl-leucine
  SITE 17: note = Lysine is chemically modified through conjugation of the epsilon-amino group of the Lysine side chain with (2-[2-(2-Amino-ethoxy)-ethoxy]-acetyl)2-(gamma-Glu)-CO-(CH2 )16-CO2H
  SITE 20: note = 2-Aminoisobutyric Acid
  SITE 29: note = D-amino acid
  SITE 41: note = Amidated residue
YXQGTFTSDFSXXLDKKAQXAFIEYLLEAGPSSGEPPPSGE

SEQ ID NO: 124 - protein, 41 aa, synthetic construct
  SITE 2: note = 2-Aminoisobutyric Acid
  SITE 12: note = L-ornithine
  SITE 13: note = alpha-methyl-leucine
  SITE 17: note = Lysine is chemically modified through conjugation of the epsilon-amino group of the Lysine side chain with (2-[2-(2-Amino-ethoxy)-ethoxy]-acetyl)2-(gamma-Glu)-CO-(CH2 )16-CO2H
  SITE 20: note = 2-Aminoisobutyric Acid
  SITE 41: note = Amidated residue
YXQGTFTSDFSXXLDKKAQXAFIEYLLEGGPSSGAPPPGES

SEQ ID NO: 125 - protein, 41 aa, synthetic construct; identical to SEQ ID NO: 106
  SITE 2: note = 2-Aminoisobutyric Acid
  SITE 12: note = L-ornithine
  SITE 13: note = alpha-methyl-leucine
  SITE 17: note = Lysine is chemically modified through conjugation of the epsilon-amino group of the Lysine side chain with (2-[2-(2-Amino-ethoxy)-ethoxy]-acetyl)-(gamma-Glu)-CO-(CH2) 16-CO2H
  SITE 20: note = 2-Aminoisobutyric Acid
  SITE 41: note = Amidated residue

SEQ ID NO: 126 - protein, 41 aa, synthetic construct; identical to SEQ ID NO: 107
  SITE 2: note = 2-Aminoisobutyric Acid
  SITE 12: note = L-ornithine
  SITE 13: note = alpha-methyl-leucine
  SITE 17: note = Lysine is chemically modified through conjugation of the epsilon-amino group of the Lysine side chain with (2-[2-(2-Amino-ethoxy)-ethoxy]-acetyl)-(gamma-Glu)-CO-(CH2) 16-CO2H
  SITE 20: note = 2-Aminoisobutyric Acid
  SITE 41: note = Amidated residue

SEQ ID NO: 127 - protein, 41 aa, synthetic construct
  SITE 2: note = 2-Aminoisobutyric Acid
  SITE 12: note = L-ornithine
  SITE 13: note = alpha-methyl-leucine
  SITE 17: note = Lysine is chemically modified through conjugation of the epsilon-amino group of the Lysine side chain with (2-[2-(2-Amino-ethoxy)-ethoxy]-acetyl)-(gamma-Glu)-CO-(CH2) 16-CO2H
  SITE 20: note = 2-Aminoisobutyric Acid
  SITE 41: note = Amidated residue
YXQGTFTSDFSXXLDKKAQXAFIEWLLEGGPSSGAPPPEGS

SEQ ID NO: 128 - protein, 41 aa, synthetic construct
  SITE 2: note = 2-Aminoisobutyric Acid
  SITE 12: note = L-ornithine
  SITE 13: note = alpha-methyl-leucine
  SITE 17: note = Lysine is chemically modified through conjugation of the epsilon-amino group of the Lysine side chain with (2-[2-(2-Amino-ethoxy)-ethoxy]-acetyl)-(gamma-Glu)-CO-(CH2) 16-CO2H
  SITE 20: note = 2-Aminoisobutyric Acid
  SITE 41: note = Amidated residue
YXQGTFTSDFSXXLDKKAQXAFIEWLLEGGHSSGAPPPSGE

SEQ ID NO: 129 - protein, 41 aa, synthetic construct
  SITE 2: note = 2-Aminoisobutyric Acid
  SITE 12: note = L-ornithine
  SITE 13: note = alpha-methyl-leucine
  SITE 17: note = Lysine is chemically modified through conjugation of the epsilon-amino group of the Lysine side chain with (2-[2-(2-Amino-ethoxy)-ethoxy]-acetyl)-(gamma-Glu)-CO-(CH2) 16-CO2H
  SITE 20: note = 2-Aminoisobutyric Acid
  SITE 41: note = Amidated residue
YXQGTFTSDFSXXLDKKAQXAFIEWLLEGGESSGEPPPSGE

SEQ ID NO: 130 - protein, 41 aa, synthetic construct
  SITE 2: note = 2-Aminoisobutyric Acid
  SITE 12: note = L-ornithine
  SITE 13: note = alpha-methyl-leucine
  SITE 17: note = Lysine is chemically modified through conjugation of the epsilon-amino group of the Lysine side chain with (2-[2-(2-Amino-ethoxy)-ethoxy]-acetyl)-(gamma-Glu)-CO-(CH2) 16-CO2H
  SITE 20: note = 2-Aminoisobutyric Acid
  SITE 41: note = Amidated residue
YXQGTFTSDFSXXLDKKAQXAFIEWLLEGGHSSGEPPPSGE

SEQ ID NO: 131 - protein, 41 aa, synthetic construct
  SITE 2: note = 2-Aminoisobutyric Acid
  SITE 12: note = L-ornithine
  SITE 13: note = alpha-methyl-leucine
  SITE 17: note = Lysine is chemically modified through conjugation of the epsilon-amino group of the Lysine side chain with (2-[2-(2-Amino-ethoxy)-ethoxy]-acetyl)-(gamma-Glu)-CO-(CH2) 16-CO2H
  SITE 20: note = 2-Aminoisobutyric Acid
  SITE 41: note = Amidated residue
YXQGTFTSDFSXXLDKKAQXAFIEWLLEGGESSGAPPPEGS

SEQ ID NO: 132 - protein, 41 aa, synthetic construct
  SITE 2: note = 2-Aminoisobutyric Acid
  SITE 12: note = L-ornithine
  SITE 13: note = alpha-methyl-leucine
  SITE 17: note = Lysine is chemically modified through conjugation of the epsilon-amino group of the Lysine side chain with (2-[2-(2-Amino-ethoxy)-ethoxy]-acetyl)-(gamma-Glu)-CO-(CH2) 16-CO2H
  SITE 20: note = 2-Aminoisobutyric Acid
  SITE 41: note = Amidated residue
YXQGTFTSDFSXXLDKKAQXAFIEWLLEGGHSSGAPPPEGS

SEQ ID NO: 133 - protein, 41 aa, synthetic construct
  SITE 2: note = 2-Aminoisobutyric Acid
  SITE 12: note = L-ornithine
  SITE 13: note = alpha-methyl-leucine
  SITE 17: note = Lysine is chemically modified through conjugation of the epsilon-amino group of the Lysine side chain with (2-[2-(2-Amino-ethoxy)-ethoxy]-acetyl)-(gamma-Glu)-CO-(CH2) 16-CO2H
  SITE 20: note = 2-Aminoisobutyric Acid
  SITE 41: note = Amidated residue
YXQGTFTSDFSXXLDKKAQXAFIEWLLEGGHSSGEPPPEGS

SEQ ID NO: 134 - protein, 41 aa, synthetic construct
  SITE 2: note = 2-Aminoisobutyric Acid
  SITE 12: note = L-ornithine
  SITE 13: note = alpha-methyl-leucine
  SITE 17: note = Lysine is chemically modified through conjugation of the epsilon-amino group of the Lysine side chain with (2-[2-(2-Amino-ethoxy)-ethoxy]-acetyl)2-(gamma-Glu)-CO-(CH2 )16-CO2H
  SITE 20: note = 2-Aminoisobutyric Acid
  SITE 29: note = D-amino acid
  SITE 41: note = Amidated residue
YXQGTFTSDFSXXLDKKAQXAFIEYLLEAGPSSGAPPPSGE

SEQ ID NO: 135 - protein, 41 aa, synthetic construct; identical to SEQ ID NO: 134
  SITE 2: note = 2-Aminoisobutyric Acid
  SITE 12: note = L-ornithine
  SITE 13: note = alpha-methyl-leucine
  SITE 17: note = Lysine is chemically modified through conjugation of the epsilon-amino group of the Lysine side chain with (2-[2-(2-Amino-ethoxy)-ethoxy]-acetyl)-(gamma-Glu)-CO-(CH2) 16-CO2H
  SITE 20: note = 2-Aminoisobutyric Acid
  SITE 29: note = D-amino acid
  SITE 41: note = Amidated residue

SEQ ID NO: 136 - protein, 41 aa, synthetic construct
  SITE 2: note = 2-Aminoisobutyric Acid
  SITE 12: note = L-ornithine
  SITE 13: note = alpha-methyl-leucine
  SITE 17: note = Lysine is chemically modified through conjugation of the epsilon-amino group of the Lysine side chain with (2-[2-(2-Amino-ethoxy)-ethoxy]-acetyl)-(gamma-Glu)-CO-(CH2) 16-CO2H
  SITE 20: note = 2-Aminoisobutyric Acid
  SITE 41: note = Amidated residue
YXQGTFTSDFSXXLDKKAQXAFIEYLLEGGPSSGAPPPEGS

SEQ ID NO: 137 - protein, 41 aa, synthetic construct
  SITE 2: note = 2-Aminoisobutyric Acid
  SITE 12: note = L-ornithine
  SITE 13: note = alpha-methyl-leucine
  SITE 17: note = Lysine is chemically modified through conjugation of the epsilon-amino group of the Lysine side chain with (2-[2-(2-Amino-ethoxy)-ethoxy]-acetyl)-(gamma-Glu)-CO-(CH2) 16-CO2H
  SITE 20: note = 2-Aminoisobutyric Acid
  SITE 41: note = Amidated residue
YXQGTFTSDFSXXLDKKAQXAFIEYLLEGGPSSGEPPPSGS

SEQ ID NO: 138 - protein, 41 aa, synthetic construct
  SITE 2: note = 2-Aminoisobutyric Acid
  SITE 10: note = 3-(4-Pyridyl)-L-alanine
  SITE 13: note = alpha-methyl-leucine
  SITE 17: note = Lysine is chemically modified through conjugation of the epsilon-amino group of the Lysine side chain with (2-[2-(2-Amino-ethoxy)-ethoxy]-acetyl)-(gamma-Glu)-CO-(CH2) 16-CO2H
  SITE 20: note = 2-Aminoisobutyric Acid
  SITE 29: note = 2-Aminoisobutyric Acid
  SITE 41: note = Amidated residue
YXQGTFTSDXSRXLDKKAQXAFIEYLLEXGESSGAPPPSGS

SEQ ID NO: 139 - protein, 41 aa, synthetic construct; identical to SEQ ID NO: 79
  SITE 2: note = 2-Aminoisobutyric Acid
  SITE 12: note = (S)-2,4-diaminobutanoic acid
  SITE 13: note = alpha-methyl-leucine
  SITE 17: note = Lysine is chemically modified through conjugation of the epsilon-amino group of the Lysine side chain with (2-[2-(2-Amino-ethoxy)-ethoxy]-acetyl)-(gamma-Glu)-CO-(CH2) 16-CO2H
  SITE 20: note = 2-Aminoisobutyric Acid
  SITE 29: note = 2-Aminoisobutyric Acid
  SITE 41: note = Amidated residue

SEQ ID NO: 140 - protein, 41 aa, synthetic construct; identical to SEQ ID NO: 79
  SITE 2: note = 2-Aminoisobutyric Acid
  SITE 12: note = (S)-2,3-diaminopropanoic acid
  SITE 13: note = alpha-methyl-leucine
  SITE 17: note = Lysine is chemically modified through conjugation of the epsilon-amino group of the Lysine side chain with (2-[2-(2-Amino-ethoxy)-ethoxy]-acetyl)-(gamma-Glu)-CO-(CH2) 16-CO2H
  SITE 20: note = 2-Aminoisobutyric Acid
  SITE 29: note = 2-Aminoisobutyric Acid
  SITE 41: note = Amidated residue

SEQ ID NO: 141 - protein, 41 aa, synthetic construct; identical to SEQ ID NO: 123
  SITE 2: note = 2-Aminoisobutyric Acid
  SITE 12: note = L-ornithine
  SITE 13: note = alpha-methyl-leucine
  SITE 17: note = Lysine is chemically modified through conjugation of the epsilon-amino group of the Lysine side chain with (2-[2-(2-Amino-ethoxy)-ethoxy]-acetyl)-(gamma-Glu)-CO-(CH2) 16-CO2H
  SITE 20: note = 2-Aminoisobutyric Acid
  SITE 29: note = D-amino acid
  SITE 41: note = Amidated residue

SEQ ID NO: 142 - protein, 41 aa, synthetic construct
  SITE 2: note = 2-Aminoisobutyric Acid
  SITE 12: note = L-ornithine
  SITE 13: note = alpha-methyl-leucine
  SITE 17: note = Lysine is chemically modified through conjugation of the epsilon-amino group of the Lysine side chain with (2-[2-(2-Amino-ethoxy)-ethoxy]-acetyl)-(gamma-Glu)-CO-(CH2) 16-CO2H
  SITE 20: note = 2-Aminoisobutyric Acid
  SITE 36: note = Hydroxy-L-proline
  SITE 41: note = Amidated residue
YXQGTFTSDFSXXLDKKAQXAFIEWLLEGGPSSGAXPPSGE

SEQ ID NO: 143 - protein, 41 aa, synthetic construct
  SITE 2: note = 2-Aminoisobutyric Acid
  SITE 12: note = L-ornithine
  SITE 13: note = alpha-methyl-leucine
  SITE 17: note = Lysine is chemically modified through conjugation of the epsilon-amino group of the Lysine side chain with (2-[2-(2-Amino-ethoxy)-ethoxy]-acetyl)-(gamma-Glu)-CO-(CH2) 16-CO2H
  SITE 20: note = 2-Aminoisobutyric Acid
  SITE 37: note = Hydroxy-L-proline
  SITE 41: note = Amidated residue
YXQGTFTSDFSXXLDKKAQXAFIEWLLEGGPSSGAPXPSGE

SEQ ID NO: 144 - protein, 41 aa, synthetic construct; identical to SEQ ID NO: 111
  SITE 2: note = 2-Aminoisobutyric Acid
  SITE 12: note = L-ornithine
  SITE 13: note = alpha-methyl-leucine
  SITE 17: note = Lysine is chemically modified through conjugation of the epsilon-amino group of the Lysine side chain with (2-[2-(2-Amino-ethoxy)-ethoxy]-acetyl)-(gamma-Glu)-CO-(CH2) 16-CO2H
  SITE 20: note = 2-Aminoisobutyric Acid
  SITE 38: note = Hydroxy-L-proline
  SITE 41: note = Amidated residue

SEQ ID NO: 145 - protein, 41 aa, synthetic construct
  SITE 2: note = 2-Aminoisobutyric Acid
  SITE 12: note = L-ornithine
  SITE 13: note = alpha-methyl-leucine
  SITE 17: note = Lysine is chemically modified through conjugation of the epsilon-amino group of the Lysine side chain with (2-[2-(2-Amino-ethoxy)-ethoxy]-acetyl)2-(gamma-Glu)-CO-(CH2 )16-CO2H
  SITE 20: note = 2-Aminoisobutyric Acid
  SITE 41: note = Amidated residue
YXQGTFTSDFSXXLDKKAQXAFIEYLLEGGPSSGAPPPSGS

SEQ ID NO: 146 - protein, 41 aa, synthetic construct; identical to SEQ ID NO: 145
  SITE 2: note = 2-Aminoisobutyric Acid
  SITE 12: note = L-ornithine
  SITE 13: note = alpha-methyl-leucine
  SITE 17: note = Lysine is chemically modified through conjugation of the epsilon-amino group of the Lysine side chain with (2-[2-(2-Amino-ethoxy)-ethoxy]-acetyl)2-(gamma-Glu)-CO-(CH2 )16-CO2H
  SITE 20: note = 2-Aminoisobutyric Acid
  SITE 41: note = Amidated residue

SEQ ID NO: 147 - protein, 41 aa, synthetic construct
  SITE 2: note = 2-Aminoisobutyric Acid
  SITE 13: note = alpha-methyl-leucine
  SITE 17: note = Lysine is chemically modified through conjugation of the epsilon-amino group of the Lysine side chain with (2-[2-(2-Amino-ethoxy)-ethoxy]-acetyl)-(gamma-Glu)-CO-(CH2) 16-CO2H
  SITE 20: note = 2-Aminoisobutyric Acid
  SITE 41: note = Amidated residue
YXQGTFTSDFSKXLDKKAQXAFIEYLLEGGPSSGAPPPSGS

SEQ ID NO: 148 - protein, 41 aa, synthetic construct; identical to SEQ ID NO: 147
  SITE 2: note = 2-Aminoisobutyric Acid
  SITE 13: note = alpha-methyl-leucine
  SITE 17: note = Lysine is chemically modified through conjugation of the epsilon-amino group of the Lysine side chain with (2-[2-(2-Amino-ethoxy)-ethoxy]-acetyl)2-(gamma-Glu)-CO-(CH2 )16-CO2H
  SITE 20: note = 2-Aminoisobutyric Acid
  SITE 41: note = Amidated residue

SEQ ID NO: 149 - protein, 41 aa, synthetic construct
  SITE 2: note = 2-Aminoisobutyric Acid
  SITE 13: note = alpha-methyl-leucine
  SITE 17: note = Lysine is chemically modified through conjugation of the epsilon-amino group of the Lysine side chain with (2-[2-(2-Amino-ethoxy)-ethoxy]-acetyl)-(gamma-Glu)-CO-(CH2) 16-CO2H
  SITE 20: note = 2-Aminoisobutyric Acid
  SITE 41: note = Amidated residue
YXQGTFTSDFSRXLDKKAQXAFIEYLLEGGPSSGAPPPSGS

SEQ ID NO: 150 - protein, 41 aa, synthetic construct; identical to SEQ ID NO: 149
  SITE 2: note = 2-Aminoisobutyric Acid
  SITE 13: note = alpha-methyl-leucine
  SITE 17: note = Lysine is chemically modified through conjugation of the epsilon-amino group of the Lysine side chain with (2-[2-(2-Amino-ethoxy)-ethoxy]-acetyl)2-(gamma-Glu)-CO-(CH2 )16-CO2H
  SITE 20: note = 2-Aminoisobutyric Acid
  SITE 41: note = Amidated residue

SEQ ID NO: 151 - protein, 41 aa, synthetic construct
  SITE 2: note = 2-Aminoisobutyric Acid
  SITE 12: note = L-ornithine
  SITE 13: note = alpha-methyl-leucine
  SITE 17: note = Lysine is chemically modified through conjugation of the epsilon-amino group of the Lysine side chain with (2-[2-(2-Amino-ethoxy)-ethoxy]-acetyl)-(gamma-Glu)-CO-(CH2) 16-CO2H
  SITE 20: note = 2-Aminoisobutyric Acid
  SITE 41: note = Amidated residue
YXQGTFTSDFSXXLDKKAQXAFIEYLLEGGESSGAPPPSGS

SEQ ID NO: 152 - protein, 41 aa, synthetic construct
  SITE 2: note = 2-Aminoisobutyric Acid
  SITE 13: note = alpha-methyl-leucine
  SITE 17: note = Lysine is chemically modified through conjugation of the epsilon-amino group of the Lysine side chain with (2-[2-(2-Amino-ethoxy)-ethoxy]-acetyl)-(gamma-Glu)-CO-(CH2) 16-CO2H
  SITE 20: note = 2-Aminoisobutyric Acid
  SITE 41: note = Amidated residue
YXQGTFTSDFSKXLDKKAQXAFIEYLLEGGESSGAPPPSGS

SEQ ID NO: 153 - protein, 41 aa, synthetic construct; identical to SEQ ID NO: 152
  SITE 2: note = 2-Aminoisobutyric Acid
  SITE 13: note = alpha-methyl-leucine
  SITE 17: note = Lysine is chemically modified through conjugation of the epsilon-amino group of the Lysine side chain with (2-[2-(2-Amino-ethoxy)-ethoxy]-acetyl)2-(gamma-Glu)-CO-(CH2 )16-CO2H
  SITE 20: note = 2-Aminoisobutyric Acid
  SITE 41: note = Amidated residue

SEQ ID NO: 154 - protein, 41 aa, synthetic construct
  SITE 2: note = 2-Aminoisobutyric Acid
  SITE 13: note = alpha-methyl-leucine
  SITE 17: note = Lysine is chemically modified through conjugation of the epsilon-amino group of the Lysine side chain with (2-[2-(2-Amino-ethoxy)-ethoxy]-acetyl)-(gamma-Glu)-CO-(CH2) 16-CO2H
  SITE 20: note = 2-Aminoisobutyric Acid
  SITE 41: note = Amidated residue
YXQGTFTSDFSRXLDKKAQXAFIEYLLEGGESSGAPPPSGS

SEQ ID NO: 155 - protein, 41 aa, synthetic construct; identical to SEQ ID NO: 154
  SITE 2: note = 2-Aminoisobutyric Acid
  SITE 13: note = alpha-methyl-leucine
  SITE 17: note = Lysine is chemically modified through conjugation of the epsilon-amino group of the Lysine side chain with (2-[2-(2-Amino-ethoxy)-ethoxy]-acetyl)2-(gamma-Glu)-CO-(CH2 )16-CO2H
  SITE 20: note = 2-Aminoisobutyric Acid
  SITE 41: note = Amidated residue

SEQ ID NO: 156 - protein, 41 aa, synthetic construct
  SITE 2: note = 2-Aminoisobutyric Acid
  SITE 13: note = alpha-methyl-leucine
  SITE 17: note = Lysine is chemically modified through conjugation of the epsilon-amino group of the Lysine side chain with (2-[2-(2-Amino-ethoxy)-ethoxy]-acetyl)-(gamma-Glu)-CO-(CH2) 16-CO2H
  SITE 20: note = 2-Aminoisobutyric Acid
  SITE 41: note = Amidated residue
YXQGTFTSDFSQXLDKKAQXAFIEYLLEGGPSSGAPPPSGS

SEQ ID NO: 157 - protein, 41 aa, synthetic construct
  SITE 2: note = 2-Aminoisobutyric Acid
  SITE 13: note = alpha-methyl-leucine
  SITE 17: note = Lysine is chemically modified through conjugation of the epsilon-amino group of the Lysine side chain with (2-[2-(2-Amino-ethoxy)-ethoxy]-acetyl)-(gamma-Glu)-CO-(CH2) 16-CO2H
  SITE 20: note = 2-Aminoisobutyric Acid
  SITE 29: note = 2-Aminoisobutyric Acid
  SITE 41: note = Amidated residue
YXQGTFTSDFSQXLDKKAQXAFIEYLLEXGPSSGAPPPSGS

SEQ ID NO: 158 - protein, 41 aa, synthetic construct
  SITE 2: note = 2-Aminoisobutyric Acid
  SITE 12: note = L-ornithine
  SITE 13: note = alpha-methyl-leucine
  SITE 17: note = Lysine is chemically modified through conjugation of the epsilon-amino group of the Lysine side chain with (2-[2-(2-Amino-ethoxy)-ethoxy]-acetyl)-(gamma-Glu)-CO-(CH2) 16-CO2H
  SITE 20: note = 2-Aminoisobutyric Acid
  SITE 41: note = Amidated residue
YXQGTFTSDFSXXLDKKAQXAFIEYLLAGGPSSGEPPPEGS

SEQ ID NO: 159 - protein, 41 aa, synthetic construct; identical to SEQ ID NO: 98
  SITE 2: note = 2-Aminoisobutyric Acid
  SITE 12: note = L-ornithine
  SITE 13: note = alpha-methyl-leucine
  SITE 17: note = Lysine is chemically modified through conjugation of the epsilon-amino group of the Lysine side chain with (2-[2-(2-Amino-ethoxy)-ethoxy]-acetyl)-(gamma-Glu)2-CO-(CH2 )16-CO2H
  SITE 20: note = 2-Aminoisobutyric Acid
  SITE 41: note = Amidated residue

SEQ ID NO: 160 - protein, 41 aa, synthetic construct
  SITE 2: note = 2-Aminoisobutyric Acid
  SITE 10: note = 3-(4-Pyridyl)-L-alanine
  SITE 12: note = L-ornithine
  SITE 13: note = alpha-methyl-leucine
  SITE 17: note = Lysine is chemically modified through conjugation of the epsilon-amino group of the Lysine side chain with (2-[2-(2-Amino-ethoxy)-ethoxy]-acetyl)-(gamma-Glu)-CO-(CH2) 16-CO2H
  SITE 20: note = 2-Aminoisobutyric Acid
  SITE 41: note = Amidated residue
YXQGTFTSDXSXXLDKKAQXAFIEYLLAGGPSSGEPPPSGS

SEQ ID NO: 161 - protein, 41 aa, synthetic construct
  SITE 2: note = 2-Aminoisobutyric Acid
  SITE 12: note = L-ornithine
  SITE 13: note = alpha-methyl-leucine
  SITE 17: note = Lysine is chemically modified through conjugation of the epsilon-amino group of the Lysine side chain with (2-[2-(2-Amino-ethoxy)-ethoxy]-acetyl)2-(gamma-Glu)-CO-(CH2 )16-CO2H
  SITE 20: note = 2-Aminoisobutyric Acid
  SITE 29: note = D-amino acid
  SITE 41: note = Amidated residue
YXQGTFTSDFSXXLDKKAQXAFIEYLLEAGPSSGEPPPSGS

SEQ ID NO: 162 - protein, 41 aa, synthetic construct
  SITE 2: note = 2-Aminoisobutyric Acid
  SITE 12: note = L-ornithine
  SITE 13: note = alpha-methyl-leucine
  SITE 17: note = Lysine is chemically modified through conjugation of the epsilon-amino group of the Lysine side chain with (2-[2-(2-Amino-ethoxy)-ethoxy]-acetyl)2-(gamma-Glu)-CO-(CH2 )16-CO2H
  SITE 20: note = 2-Aminoisobutyric Acid
  SITE 29: note = D-amino acid
  SITE 41: note = Amidated residue
YXQGTFTSDFSXXLDKKAQXAFIEYLLEAGPSSGEPPPSGT

SEQ ID NO: 163 - protein, 41 aa, synthetic construct
  SITE 2: note = 2-Aminoisobutyric Acid
  SITE 12: note = L-ornithine
  SITE 13: note = alpha-methyl-leucine
  SITE 17: note = Lysine is chemically modified through conjugation of the epsilon-amino group of the Lysine side chain with (2-[2-(2-Amino-ethoxy)-ethoxy]-acetyl)2-(gamma-Glu)-CO-(CH2 )16-CO2H
  SITE 20: note = 2-Aminoisobutyric Acid
  SITE 29: note = D-amino acid
  SITE 41: note = Amidated residue
YXQGTFTSDFSXXLDKKAQXAFIEYLLEAGPSSGEPPPSGQ

SEQ ID NO: 164 - protein, 41 aa, synthetic construct
  SITE 2: note = 2-Aminoisobutyric Acid
  SITE 12: note = L-ornithine
  SITE 13: note = alpha-methyl-leucine
  SITE 17: note = Lysine is chemically modified through conjugation of the epsilon-amino group of the Lysine side chain with (2-[2-(2-Amino-ethoxy)-ethoxy]-acetyl)-(gamma-Glu)-CO-(CH2) 16-CO2H
  SITE 20: note = 2-Aminoisobutyric Acid
  SITE 41: note = Amidated residue
YXQGTFTSDFSXXLDKKAQXAFIEYLLEGGPSSGAPPPGGT

SEQ ID NO: 165 - protein, 41 aa, synthetic construct
  SITE 2: note = 2-Aminoisobutyric Acid
  SITE 12: note = L-ornithine
  SITE 13: note = alpha-methyl-leucine
  SITE 17: note = Lysine is chemically modified through conjugation of the epsilon-amino group of the Lysine side chain with (2-[2-(2-Amino-ethoxy)-ethoxy]-acetyl)-(gamma-Glu)-CO-(CH2) 16-CO2H
  SITE 20: note = 2-Aminoisobutyric Acid
  SITE 41: note = Amidated residue
YXQGTFTSDFSXXLDKKAQXAFIEYLLEGGPSSGAPPPGGQ

SEQ ID NO: 166 - protein, 41 aa, synthetic construct
  SITE 2: note = 2-Aminoisobutyric Acid
  SITE 12: note = L-ornithine
  SITE 13: note = alpha-methyl-leucine
  SITE 17: note = Lysine is chemically modified through conjugation of the epsilon-amino group of the Lysine side chain with (2-[2-(2-Amino-ethoxy)-ethoxy]-acetyl)-(gamma-Glu)-CO-(CH2) 16-CO2H
  SITE 20: note = 2-Aminoisobutyric Acid
  SITE 41: note = Amidated residue
YXQGTFTSDFSXXLDKKAQXAFIEYLLEGGPSSGAPPPEGT

SEQ ID NO: 167 - protein, 41 aa, synthetic construct
  SITE 2: note = 2-Aminoisobutyric Acid
  SITE 12: note = L-ornithine
  SITE 13: note = alpha-methyl-leucine
  SITE 17: note = Lysine is chemically modified through conjugation of the epsilon-amino group of the Lysine side chain with (2-[2-(2-Amino-ethoxy)-ethoxy]-acetyl)-(gamma-Glu)-CO-(CH2) 16-CO2H
  SITE 20: note = 2-Aminoisobutyric Acid
  SITE 41: note = Amidated residue
YXQGTFTSDFSXXLDKKAQXAFIEYLLEGGESSGAPPPGGS

SEQ ID NO: 168 - protein, 41 aa, synthetic construct
  SITE 2: note = 2-Aminoisobutyric Acid
  SITE 12: note = L-ornithine
  SITE 13: note = alpha-methyl-leucine
  SITE 17: note = Lysine is chemically modified through conjugation of the epsilon-amino group of the Lysine side chain with (2-[2-(2-Amino-ethoxy)-ethoxy]-acetyl)-(gamma-Glu)-CO-(CH2) 16-CO2H
  SITE 20: note = 2-Aminoisobutyric Acid
  SITE 41: note = Amidated residue
YXQGTFTSDFSXXLDKKAQXAFIEYLLEGGHSSGAPPPGGS

SEQ ID NO: 169 - protein, 41 aa, synthetic construct
  SITE 2: note = 2-Aminoisobutyric Acid
  SITE 12: note = L-ornithine
  SITE 13: note = alpha-methyl-leucine
  SITE 17: note = Lysine is chemically modified through conjugation of the epsilon-amino group of the Lysine side chain with (2-[2-(2-Amino-ethoxy)-ethoxy]-acetyl)-(gamma-Glu)-CO-(CH2) 16-CO2H
  SITE 20: note = 2-Aminoisobutyric Acid
  SITE 31: note = 3-(4-Pyridyl)-L-alanine
  SITE 41: note = Amidated residue
YXQGTFTSDFSXXLDKKAQXAFIEYLLEGGXSSGAPPPGGS

SEQ ID NO: 170 - protein, 41 aa, synthetic construct
  SITE 2: note = 2-Aminoisobutyric Acid
  SITE 12: note = L-ornithine
  SITE 13: note = alpha-methyl-leucine
  SITE 17: note = Lysine is chemically modified through conjugation of the epsilon-amino group of the Lysine side chain with (2-[2-(2-Amino-ethoxy)-ethoxy]-acetyl)-(gamma-Glu)-CO-(CH2) 16-CO2H
  SITE 20: note = 2-Aminoisobutyric Acid
  SITE 41: note = Amidated residue
YXQGTFTSDFSXXLDKKAQXAFIEYLLEGGHSSGEPPPGGS

SEQ ID NO: 171 - protein, 41 aa, synthetic construct
  SITE 2: note = 2-Aminoisobutyric Acid
  SITE 12: note = L-ornithine
  SITE 13: note = alpha-methyl-leucine
  SITE 17: note = Lysine is chemically modified through conjugation of the epsilon-amino group of the Lysine side chain with (2-[2-(2-Amino-ethoxy)-ethoxy]-acetyl)2-(gamma-Glu)-CO-(CH2 )16-CO2H
  SITE 20: note = 2-Aminoisobutyric Acid
  SITE 29: note = 2-Aminoisobutyric Acid
  SITE 41: note = Amidated residue
YXQGTFTSDFSXXLDKKAQXAFIEYLLEXGPSSGAPPPSGT

SEQ ID NO: 172 - protein, 41 aa, synthetic construct
  SITE 2: note = 2-Aminoisobutyric Acid
  SITE 12: note = L-ornithine
  SITE 13: note = alpha-methyl-leucine
  SITE 17: note = Lysine is chemically modified through conjugation of the epsilon-amino group of the Lysine side chain with (2-[2-(2-Amino-ethoxy)-ethoxy]-acetyl)2-(gamma-Glu)-CO-(CH2 )16-CO2H
  SITE 20: note = 2-Aminoisobutyric Acid
  SITE 29: note = 2-Aminoisobutyric Acid
  SITE 41: note = Amidated residue
YXQGTFTSDFSXXLDKKAQXAFIEYLLEXGPSSGEPPPSGS

SEQ ID NO: 173 - protein, 41 aa, synthetic construct
  SITE 2: note = 2-Aminoisobutyric Acid
  SITE 12: note = L-ornithine
  SITE 13: note = alpha-methyl-leucine
  SITE 17: note = Lysine is chemically modified through conjugation of the epsilon-amino group of the Lysine side chain with (2-[2-(2-Amino-ethoxy)-ethoxy]-acetyl)2-(gamma-Glu)-CO-(CH2 )16-CO2H
  SITE 20: note = 2-Aminoisobutyric Acid
  SITE 29: note = 2-Aminoisobutyric Acid
  SITE 41: note = Amidated residue
YXQGTFTSDFSXXLDKKAQXAFIEYLLEXGPSSGEPPPSGT

SEQ ID NO: 174 - protein, 41 aa, synthetic construct; identical to SEQ ID NO: 84
  SITE 2: note = 2-Aminoisobutyric Acid
  SITE 12: note = L-ornithine
  SITE 13: note = alpha-methyl-leucine
  SITE 17: note = Lysine is chemically modified through conjugation of the epsilon-amino group of the Lysine side chain with (2-[2-(2-Amino-ethoxy)-ethoxy]-acetyl)-(gamma-Glu)-CO-(CH2) 16-CO2H
  SITE 20: note = 2-Aminoisobutyric Acid
  SITE 41: note = Amidated residue

SEQ ID NO: 175 - protein, 41 aa, synthetic construct; identical to SEQ ID NO: 128
  SITE 2: note = 2-Aminoisobutyric Acid
  SITE 12: note = L-ornithine
  SITE 13: note = alpha-methyl-leucine
  SITE 17: note = Lysine is chemically modified through conjugation of the epsilon-amino group of the Lysine side chain with (2-[2-(2-Amino-ethoxy)-ethoxy]-acetyl)2-(gamma-Glu)-CO-(CH2 )16-CO2H
  SITE 20: note = 2-Aminoisobutyric Acid
  SITE 41: note = Amidated residue

SEQ ID NO: 176 - protein, 41 aa, synthetic construct
  SITE 2: note = 2-Aminoisobutyric Acid
  SITE 12: note = L-ornithine
  SITE 13: note = alpha-methyl-leucine
  SITE 17: note = Lysine is chemically modified through conjugation of the epsilon-amino group of the Lysine side chain with (2-[2-(2-Amino-ethoxy)-ethoxy]-acetyl)-(gamma-Glu)-CO-(CH2) 16-CO2H
  SITE 20: note = 2-Aminoisobutyric Acid
  SITE 41: note = Amidated residue
YXQGTFTSDFSXXLDKKAQXAFIEWLLEGGHSSGAPPPSGS

SEQ ID NO: 177 - protein, 41 aa, synthetic construct
  SITE 2: note = 2-Aminoisobutyric Acid
  SITE 12: note = L-ornithine
  SITE 13: note = alpha-methyl-leucine
  SITE 17: note = Lysine is chemically modified through conjugation of the epsilon-amino group of the Lysine side chain with (2-[2-(2-Amino-ethoxy)-ethoxy]-acetyl)-(gamma-Glu)-CO-(CH2) 16-CO2H
  SITE 20: note = 2-Aminoisobutyric Acid
  SITE 41: note = Amidated residue
YXQGTFTSDFSXXLDKKAQXAFIEWLLEGGHSSGAPPPSGT

SEQ ID NO: 178 - protein, 41 aa, synthetic construct
  SITE 2: note = 2-Aminoisobutyric Acid
  SITE 12: note = L-ornithine
  SITE 13: note = alpha-methyl-leucine
  SITE 17: note = Lysine is chemically modified through conjugation of the epsilon-amino group of the Lysine side chain with (2-[2-(2-Amino-ethoxy)-ethoxy]-acetyl)-(gamma-Glu)-CO-(CH2) 16-CO2H
  SITE 20: note = 2-Aminoisobutyric Acid
  SITE 41: note = Amidated residue
YXQGTFTSDFSXXLDKKAQXAFIEWLLEGGSSSGAPPPSGE

SEQ ID NO: 179 - protein, 41 aa, synthetic construct
  SITE 2: note = 2-Aminoisobutyric Acid
  SITE 12: note = L-ornithine
  SITE 13: note = alpha-methyl-leucine
  SITE 17: note = Lysine is chemically modified through conjugation of the epsilon-amino group of the Lysine side chain with (2-[2-(2-Amino-ethoxy)-ethoxy]-acetyl)-(gamma-Glu)-CO-(CH2) 16-CO2H
  SITE 20: note = 2-Aminoisobutyric Acid
  SITE 41: note = Amidated residue
YXQGTFTSDFSXXLDKKAQXAFIEWLLEGGSSSGAPPPSGS

SEQ ID NO: 180 - protein, 41 aa, synthetic construct
  SITE 2: note = 2-Aminoisobutyric Acid
  SITE 12: note = L-ornithine
  SITE 13: note = alpha-methyl-leucine
  SITE 17: note = Lysine is chemically modified through conjugation of the epsilon-amino group of the Lysine side chain with (2-[2-(2-Amino-ethoxy)-ethoxy]-acetyl)-(gamma-Glu)-CO-(CH2) 16-CO2H
  SITE 20: note = 2-Aminoisobutyric Acid
  SITE 41: note = Amidated residue
YXQGTFTSDFSXXLDKKAQXAFIEWLLEGGSSSGAPPPSGT

SEQ ID NO: 181 - protein, 41 aa, synthetic construct
  SITE 2: note = 2-Aminoisobutyric Acid
  SITE 12: note = L-ornithine
  SITE 13: note = alpha-methyl-leucine
  SITE 17: note = Lysine is chemically modified through conjugation of the epsilon-amino group of the Lysine side chain with (2-[2-(2-Amino-ethoxy)-ethoxy]-acetyl)-(gamma-Glu)-CO-(CH2) 16-CO2H
  SITE 20: note = 2-Aminoisobutyric Acid
  SITE 41: note = Amidated residue
YXQGTFTSDFSXXLDKKAQXAFIEWLLEGGTSSGAPPPSGE

SEQ ID NO: 182 - protein, 41 aa, synthetic construct
  SITE 2: note = 2-Aminoisobutyric Acid
  SITE 12: note = L-ornithine
  SITE 13: note = alpha-methyl-leucine
  SITE 17: note = Lysine is chemically modified through conjugation of the epsilon-amino group of the Lysine side chain with (2-[2-(2-Amino-ethoxy)-ethoxy]-acetyl)-(gamma-Glu)-CO-(CH2) 16-CO2H
  SITE 20: note = 2-Aminoisobutyric Acid
  SITE 41: note = Amidated residue
YXQGTFTSDFSXXLDKKAQXAFIEWLLEGGTSSGAPPPSGS

SEQ ID NO: 183 - protein, 41 aa, synthetic construct
  SITE 2: note = 2-Aminoisobutyric Acid
  SITE 12: note = L-ornithine
  SITE 13: note = alpha-methyl-leucine
  SITE 17: note = Lysine is chemically modified through conjugation of the epsilon-amino group of the Lysine side chain with (2-[2-(2-Amino-ethoxy)-ethoxy]-acetyl)-(gamma-Glu)-CO-(CH2) 16-CO2H
  SITE 20: note = 2-Aminoisobutyric Acid
  SITE 41: note = Amidated residue
YXQGTFTSDFSXXLDKKAQXAFIEWLLEGGTSSGAPPPSGT

SEQ ID NO: 184 - protein, 41 aa, synthetic construct
  SITE 2: note = 2-Aminoisobutyric Acid
  SITE 10: note = 4-cyano-L-phenylalanine
  SITE 12: note = L-ornithine
  SITE 13: note = alpha-methyl-leucine
  SITE 17: note = Lysine is chemically modified through conjugation of the epsilon-amino group of the Lysine side chain with (2-[2-(2-Amino-ethoxy)-ethoxy]-acetyl)2-(gamma-Glu)-CO-(CH2 )16-CO2H
  SITE 20: note = 2-Aminoisobutyric Acid
  SITE 29: note = 2-Aminoisobutyric Acid
  SITE 41: note = Amidated residue
YXQGTFTSDXSXXLDKKAQXAFIEYLLEXGPSSGAPPPSGS

SEQ ID NO: 185 - protein, 41 aa, synthetic construct
  SITE 2: note = 2-Aminoisobutyric Acid
  SITE 12: note = L-ornithine
  SITE 13: note = alpha-methyl-leucine
  SITE 17: note = Lysine is chemically modified through conjugation of the epsilon-amino group of the Lysine side chain with (2-[2-(2-Amino-ethoxy)-ethoxy]-acetyl)2-(gamma-Glu)-CO-(CH2 )16-CO2H
  SITE 20: note = 2-Aminoisobutyric Acid
  SITE 29: note = 2-Aminoisobutyric Acid
  SITE 41: note = Amidated residue
YXQGTFTSDFSXXLDKKAQXAFIEYLLEXGESSGAPPPSGS

SEQ ID NO: 186 - protein, 41 aa, synthetic construct
  SITE 2: note = 2-Aminoisobutyric Acid
  SITE 12: note = L-ornithine
  SITE 13: note = alpha-methyl-leucine
  SITE 17: note = Lysine is chemically modified through conjugation of the epsilon-amino group of the Lysine side chain with (2-[2-(2-Amino-ethoxy)-ethoxy]-acetyl)2-(gamma-Glu)-CO-(CH2 )16-CO2H
  SITE 20: note = 2-Aminoisobutyric Acid
  SITE 29: note = 2-Aminoisobutyric Acid
  SITE 41: note = Amidated residue
YXQGTFTSDFSXXLDKKAQXAFIEYLLEXGESSGAPPPSGT

SEQ ID NO: 187 - protein, 41 aa, synthetic construct
  SITE 2: note = 2-Aminoisobutyric Acid
  SITE 12: note = L-ornithine
  SITE 13: note = alpha-methyl-leucine
  SITE 17: note = Lysine is chemically modified through conjugation of the epsilon-amino group of the Lysine side chain with (2-[2-(2-Amino-ethoxy)-ethoxy]-acetyl)2-(gamma-Glu)-CO-(CH2 )16-CO2H
  SITE 20: note = 2-Aminoisobutyric Acid
  SITE 29: note = 2-Aminoisobutyric Acid
  SITE 41: note = Amidated residue
YXQGTFTSDFSXXLDKKAQXAFIEYLLEXGHSSGAPPPSGS

SEQ ID NO: 188 - protein, 41 aa, synthetic construct
  SITE 2: note = 2-Aminoisobutyric Acid
  SITE 12: note = L-ornithine
  SITE 13: note = alpha-methyl-leucine
  SITE 17: note = Lysine is chemically modified through conjugation of the epsilon-amino group of the Lysine side chain with (2-[2-(2-Amino-ethoxy)-ethoxy]-acetyl)2-(gamma-Glu)-CO-(CH2 )16-CO2H
  SITE 20: note = 2-Aminoisobutyric Acid
  SITE 29: note = 2-Aminoisobutyric Acid
  SITE 41: note = Amidated residue
YXQGTFTSDFSXXLDKKAQXAFIEYLLEXGHSSGAPPPSGT

SEQ ID NO: 189 - protein, 41 aa, synthetic construct
  SITE 2: note = 2-Aminoisobutyric Acid
  SITE 12: note = L-ornithine
  SITE 13: note = alpha-methyl-leucine
  SITE 17: note = Lysine is chemically modified through conjugation of the epsilon-amino group of the Lysine side chain with (2-[2-(2-Amino-ethoxy)-ethoxy]-acetyl)2-(gamma-Glu)-CO-(CH2 )16-CO2H
  SITE 20: note = 2-Aminoisobutyric Acid
  SITE 29: note = 2-Aminoisobutyric Acid
  SITE 31: note = 3-(4-Pyridyl)-L-alanine
  SITE 41: note = Amidated residue
YXQGTFTSDFSXXLDKKAQXAFIEYLLEXGXSSGAPPPSGS

SEQ ID NO: 190 - protein, 41 aa, synthetic construct
  SITE 2: note = 2-Aminoisobutyric Acid
  SITE 12: note = L-ornithine
  SITE 13: note = alpha-methyl-leucine
  SITE 17: note = Lysine is chemically modified through conjugation of the epsilon-amino group of the Lysine side chain with (2-[2-(2-Amino-ethoxy)-ethoxy]-acetyl)2-(gamma-Glu)-CO-(CH2 )16-CO2H
  SITE 20: note = 2-Aminoisobutyric Acid
  SITE 29: note = 2-Aminoisobutyric Acid
  SITE 31: note = 3-(4-Pyridyl)-L-alanine
  SITE 41: note = Amidated residue
YXQGTFTSDFSXXLDKKAQXAFIEYLLEXGXSSGAPPPSGT

SEQ ID NO: 191 - protein, 41 aa, synthetic construct
  SITE 2: note = 2-Aminoisobutyric Acid
  SITE 12: note = L-ornithine
  SITE 13: note = alpha-methyl-leucine
  SITE 17: note = Lysine is chemically modified through conjugation of the epsilon-amino group of the Lysine side chain with (2-[2-(2-Amino-ethoxy)-ethoxy]-acetyl)2-(gamma-Glu)-CO-(CH2 )16-CO2H
  SITE 20: note = 2-Aminoisobutyric Acid
  SITE 29: note = 2-Aminoisobutyric Acid
  SITE 41: note = Amidated residue
YXQGTFTSDFSXXLDKKAQXAFIEYLLEXGESSGAPPPSGE

SEQ ID NO: 192 - protein, 41 aa, synthetic construct
  SITE 2: note = 2-Aminoisobutyric Acid
  SITE 12: note = L-ornithine
  SITE 13: note = alpha-methyl-leucine
  SITE 17: note = Lysine is chemically modified through conjugation of the epsilon-amino group of the Lysine side chain with (2-[2-(2-Amino-ethoxy)-ethoxy]-acetyl)2-(gamma-Glu)-CO-(CH2 )16-CO2H
  SITE 20: note = 2-Aminoisobutyric Acid
  SITE 29: note = 2-Aminoisobutyric Acid
  SITE 41: note = Amidated residue
YXQGTFTSDFSXXLDKKAQXAFIEYLLEXGHSSGAPPPSGE

SEQ ID NO: 193 - protein, 41 aa, synthetic construct
  SITE 2: note = 2-Aminoisobutyric Acid
  SITE 10: note = 3-(4-Pyridyl)-L-alanine
  SITE 13: note = alpha-methyl-leucine
  SITE 17: note = Lysine is chemically modified through conjugation of the epsilon-amino group of the Lysine side chain with (2-[2-(2-Amino-ethoxy)-ethoxy]-acetyl)-(gamma-Glu)-CO-(CH2) 16-CO2H
  SITE 20: note = 2-Aminoisobutyric Acid
  SITE 29: note = 2-Aminoisobutyric Acid
  SITE 41: note = Amidated residue
YXQGTFTSDXSRXLDKKAQXAFIEYLIEXGESSGAPPPSGS

SEQ ID NO: 194 - protein, 41 aa, synthetic construct
  SITE 2: note = 2-Aminoisobutyric Acid
  SITE 10: note = 3-(4-Pyridyl)-L-alanine
  SITE 12: note = (S)-2,4-diaminobutanoic acid
  SITE 13: note = alpha-methyl-leucine
  SITE 17: note = Lysine is chemically modified through conjugation of the epsilon-amino group of the Lysine side chain with (2-[2-(2-Amino-ethoxy)-ethoxy]-acetyl)-(gamma-Glu)-CO-(CH2) 16-CO2H
  SITE 20: note = 2-Aminoisobutyric Acid
  SITE 29: note = 2-Aminoisobutyric Acid
  SITE 41: note = Amidated residue
YXQGTFTSDXSXXLDKKAQXAFIEYLIEXGESSGAPPPSGS

SEQ ID NO: 195 - protein, 41 aa, synthetic construct
  SITE 2: note = 2-Aminoisobutyric Acid
  SITE 12: note = L-ornithine
  SITE 13: note = alpha-methyl-leucine
  SITE 17: note = Lysine is chemically modified through conjugation of the epsilon-amino group of the Lysine side chain with (2-[2-(2-Amino-ethoxy)-ethoxy]-acetyl)2-(gamma-Glu)-CO-(CH2 )16-CO2H
  SITE 20: note = 2-Aminoisobutyric Acid
  SITE 29: note = 2-Aminoisobutyric Acid
  SITE 31: note = 3-(4-Pyridyl)-L-alanine
  SITE 41: note = Amidated residue
YXQGTFTSDFSXXLDKKAQXAFIEYLLEXGXSSGAPPPSGE

SEQ ID NO: 196 - protein, 41 aa, synthetic construct
  SITE 2: note = 2-Aminoisobutyric Acid
  SITE 10: note = 4-cyano-L-phenylalanine
  SITE 12: note = L-ornithine
  SITE 13: note = alpha-methyl-leucine
  SITE 17: note = Lysine is chemically modified through conjugation of the epsilon-amino group of the Lysine side chain with (2-[2-(2-Amino-ethoxy)-ethoxy]-acetyl)-(gamma-Glu)-CO-(CH2) 16-CO2H
  SITE 20: note = 2-Aminoisobutyric Acid
  SITE 29: note = 2-Aminoisobutyric Acid
  SITE 41: note = Amidated residue
YXQGTFTSDXSXXLDKKAQXAFIEYLLEXGHSSGAPPPSGS

SEQ ID NO: 197 - protein, 41 aa, synthetic construct; identical to SEQ ID NO: 184
  SITE 2: note = 2-Aminoisobutyric Acid
  SITE 10: note = 4-cyano-L-phenylalanine
  SITE 12: note = L-ornithine
  SITE 13: note = alpha-methyl-leucine
  SITE 17: note = Lysine is chemically modified through conjugation of the epsilon-amino group of the Lysine side chain with (2-[2-(2-Amino-ethoxy)-ethoxy]-acetyl)-(gamma-Glu)-CO-(CH2) 16-CO2H
  SITE 20: note = 2-Aminoisobutyric Acid
  SITE 29: note = 2-Aminoisobutyric Acid
  SITE 41: note = Amidated residue

SEQ ID NO: 198 - protein, 41 aa, synthetic construct; identical to SEQ ID NO: 79
  SITE 2: note = 2-Aminoisobutyric Acid
  SITE 12: note = L-ornithine
  SITE 13: note = alpha-methyl-leucine
  SITE 17: note = Lysine is chemically modified through conjugation of the epsilon-amino group of the Lysine side chain with (2-[2-(2-Amino-ethoxy)-ethoxy]-acetyl)-(gamma-Glu)2-CO-(CH2 )16-CO2H
  SITE 20: note = 2-Aminoisobutyric Acid
  SITE 29: note = 2-Aminoisobutyric Acid
  SITE 41: note = Amidated residue

SEQ ID NO: 199 - protein, 41 aa, synthetic construct; identical to SEQ ID NO: 79
  SITE 2: note = 2-Aminoisobutyric Acid
  SITE 12: note = L-ornithine
  SITE 13: note = alpha-methyl-leucine
  SITE 17: note = Lysine is chemically modified through conjugation of the epsilon-amino group of the Lysine side chain with (gamma-Glu)-(2-[2-(2-Amino-ethoxy)-ethoxy]-acetyl)-(gamma-G lu)-CO-(CH2)16-CO2H
  SITE 20: note = 2-Aminoisobutyric Acid
  SITE 29: note = 2-Aminoisobutyric Acid
  SITE 41: note = Amidated residue

SEQ ID NO: 200 - protein, 41 aa, synthetic construct
  SITE 2: note = 2-Aminoisobutyric Acid
  SITE 12: note = L-ornithine
  SITE 13: note = alpha-methyl-leucine
  SITE 17: note = Lysine is chemically modified through conjugation of the epsilon-amino group of the Lysine side chain with (2-[2-(2-Amino-ethoxy)-ethoxy]-acetyl)2-(gamma-Glu)-CO-(CH2 )16-CO2H
  SITE 20: note = 2-Aminoisobutyric Acid
  SITE 29: note = 2-Aminoisobutyric Acid
  SITE 41: note = Amidated residue
YXQGTFTSDFSXXLDKKAQXAFIEYLLEXGPSSGAPPPEGS

SEQ ID NO: 201 - protein, 41 aa, synthetic construct
  SITE 2: note = 2-Aminoisobutyric Acid
  SITE 12: note = L-ornithine
  SITE 13: note = alpha-methyl-leucine
  SITE 17: note = Lysine is chemically modified through conjugation of the epsilon-amino group of the Lysine side chain with (2-[2-(2-Amino-ethoxy)-ethoxy]-acetyl)2-(gamma-Glu)-CO-(CH2 )16-CO2H
  SITE 20: note = 2-Aminoisobutyric Acid
  SITE 29: note = 2-Aminoisobutyric Acid
  SITE 41: note = Amidated residue
YXQGTFTSDFSXXLDKKAQXAFIEYLLEXGPSSGEPPPEGS

SEQ ID NO: 202 - protein, 41 aa, synthetic construct; identical to SEQ ID NO: 68
  SITE 2: note = 2-Aminoisobutyric Acid
  SITE 12: note = L-ornithine
  SITE 13: note = alpha-methyl-leucine
  SITE 17: note = Lysine is chemically modified through conjugation of the epsilon-amino group of the Lysine side chain with (2-[2-(2-Amino-ethoxy)-ethoxy]-acetyl)-(gamma-Glu)-CO-(CH2) 16-CO2H
  SITE 20: note = 2-Aminoisobutyric Acid

SEQ ID NO: 203 - protein, 41 aa, synthetic construct; identical to SEQ ID NO: 164
  SITE 2: note = 2-Aminoisobutyric Acid
  SITE 12: note = L-ornithine
  SITE 13: note = alpha-methyl-leucine
  SITE 17: note = Lysine is chemically modified through conjugation of the epsilon-amino group of the Lysine side chain with (2-[2-(2-Amino-ethoxy)-ethoxy]-acetyl)-(gamma-Glu)-CO-(CH2) 16-CO2H
  SITE 20: note = 2-Aminoisobutyric Acid

SEQ ID NO: 204 - protein, 41 aa, synthetic construct; identical to SEQ ID NO: 68
  SITE 2: note = 2-Aminoisobutyric Acid
  SITE 12: note = L-ornithine
  SITE 13: note = alpha-methyl-leucine
  SITE 17: note = Lysine is chemically modified through conjugation of the epsilon-amino group of the Lysine side chain with (gamma-Glu)2-CO-(CH2)16-CO2H
  SITE 20: note = 2-Aminoisobutyric Acid
  SITE 41: note = Amidated residue

SEQ ID NO: 205 - protein, 41 aa, synthetic construct; identical to SEQ ID NO: 145
  SITE 2: note = 2-Aminoisobutyric Acid
  SITE 12: note = L-ornithine
  SITE 13: note = alpha-methyl-leucine
  SITE 17: note = Lysine is chemically modified through conjugation of the epsilon-amino group of the Lysine side chain with (gamma-Glu)2-CO-(CH2)16-CO2H
  SITE 20: note = 2-Aminoisobutyric Acid
  SITE 41: note = Amidated residue

SEQ ID NO: 206 - protein, 41 aa, synthetic construct; identical to SEQ ID NO: 171
  SITE 2: note = 2-Aminoisobutyric Acid
  SITE 12: note = L-ornithine
  SITE 13: note = alpha-methyl-leucine
  SITE 17: note = Lysine is chemically modified through conjugation of the epsilon-amino group of the Lysine side chain with (2-[2-(2-Amino-ethoxy)-ethoxy]-acetyl)-(gamma-Glu)-CO-(CH2) 16-CO2H
  SITE 20: note = 2-Aminoisobutyric Acid
  SITE 29: note = 2-Aminoisobutyric Acid
  SITE 41: note = Amidated residue

SEQ ID NO: 207 - protein, 41 aa, synthetic construct; identical to SEQ ID NO: 79
  SITE 2: note = 2-Aminoisobutyric Acid
  SITE 12: note = L-ornithine
  SITE 13: note = alpha-methyl-leucine
  SITE 17: note = Lysine is chemically modified through conjugation of the epsilon-amino group of the Lysine side chain with (gamma-Glu)2-CO-(CH2)16-CO2H
  SITE 20: note = 2-Aminoisobutyric Acid
  SITE 29: note = 2-Aminoisobutyric Acid
  SITE 41: note = Amidated residue

SEQ ID NO: 208 - protein, 41 aa, synthetic construct; identical to SEQ ID NO: 79
  SITE 2: note = 2-Aminoisobutyric Acid
  SITE 12: note = L-ornithine
  SITE 13: note = alpha-methyl-leucine
  SITE 17: note = Lysine is chemically modified through conjugation of the epsilon-amino group of the Lysine side chain with (gamma-Glu)3-CO-(CH2)16-CO2H
  SITE 20: note = 2-Aminoisobutyric Acid
  SITE 29: note = 2-Aminoisobutyric Acid
  SITE 41: note = Amidated residue

SEQ ID NO: 209 - protein, 41 aa, synthetic construct; identical to SEQ ID NO: 79
  SITE 2: note = 2-Aminoisobutyric Acid
  SITE 12: note = (S)-2,3-diaminopropanoic acid
  SITE 13: note = alpha-methyl-leucine
  SITE 17: note = Lysine is chemically modified through conjugation of the epsilon-amino group of the Lysine side chain with (gamma-Glu)2-CO-(CH2)16-CO2H
  SITE 20: note = 2-Aminoisobutyric Acid
  SITE 29: note = 2-Aminoisobutyric Acid
  SITE 41: note = Amidated residue

SEQ ID NO: 210 - protein, 41 aa, synthetic construct
  SITE 2: note = 2-Aminoisobutyric Acid
  SITE 12: note = L-ornithine
  SITE 13: note = alpha-methyl-leucine
  SITE 17: note = Lysine is chemically modified through conjugation of the epsilon-amino group of the Lysine side chain with (gamma-Glu)2-CO-(CH2)16-CO2H
  SITE 20: note = 2-Aminoisobutyric Acid
  SITE 29: note = D-amino acid
  SITE 41: note = Amidated residue
YXQGTFTSDFSXXLDKKAQXAFIEYLLEAGPSSGAPPPSGT

SEQ ID NO: 211 - protein, 41 aa, synthetic construct; identical to SEQ ID NO: 210
  SITE 2: note = 2-Aminoisobutyric Acid
  SITE 12: note = L-ornithine
  SITE 13: note = alpha-methyl-leucine
  SITE 17: note = Lysine is chemically modified through conjugation of the epsilon-amino group of the Lysine side chain with (gamma-Glu)3-CO-(CH2)16-CO2H
  SITE 20: note = 2-Aminoisobutyric Acid
  SITE 29: note = D-amino acid
  SITE 41: note = Amidated residue

SEQ ID NO: 212 - protein, 41 aa, synthetic construct
  SITE 2: note = 2-Aminoisobutyric Acid
  SITE 12: note = L-ornithine
  SITE 13: note = alpha-methyl-leucine
  SITE 17: note = Lysine is chemically modified through conjugation of the epsilon-amino group of the Lysine side chain with (2-[2-(2-Amino-ethoxy)-ethoxy]-acetyl)-(gamma-Glu)-CO-(CH2) 16-CO2H
  SITE 20: note = 2-Aminoisobutyric Acid
  SITE 29: note = D-amino acid
  SITE 41: note = Amidated residue
YXQGTFTSDFSXXLDKKAQXAFIEYLLEAGPSSGAPPPEGE

SEQ ID NO: 213 - protein, 41 aa, synthetic construct
  SITE 2: note = 2-Aminoisobutyric Acid
  SITE 12: note = L-ornithine
  SITE 13: note = alpha-methyl-leucine
  SITE 17: note = Lysine is chemically modified through conjugation of the epsilon-amino group of the Lysine side chain with (2-[2-(2-Amino-ethoxy)-ethoxy]-acetyl)-(gamma-Glu)-CO-(CH2) 16-CO2H
  SITE 20: note = 2-Aminoisobutyric Acid
  SITE 29: note = D-amino acid
  SITE 41: note = Amidated residue
YXQGTFTSDFSXXLDKKAQXAFIEYLLEAGHSSGAPPPSGE

SEQ ID NO: 214 - protein, 41 aa, synthetic construct
  SITE 2: note = 2-Aminoisobutyric Acid
  SITE 12: note = L-ornithine
  SITE 13: note = alpha-methyl-leucine
  SITE 17: note = Lysine is chemically modified through conjugation of the epsilon-amino group of the Lysine side chain with (2-[2-(2-Amino-ethoxy)-ethoxy]-acetyl)-(gamma-Glu)-CO-(CH2) 16-CO2H
  SITE 20: note = 2-Aminoisobutyric Acid
  SITE 29: note = D-amino acid
  SITE 31: note = N6-acetyl-L-lysine
  SITE 41: note = Amidated residue
YXQGTFTSDFSXXLDKKAQXAFIEYLLEAGXSSGAPPPSGE

SEQ ID NO: 215 - protein, 41 aa, synthetic construct
  SITE 2: note = 2-Aminoisobutyric Acid
  SITE 12: note = L-ornithine
  SITE 13: note = alpha-methyl-leucine
  SITE 17: note = Lysine is chemically modified through conjugation of the epsilon-amino group of the Lysine side chain with (2-[2-(2-Amino-ethoxy)-ethoxy]-acetyl)-(gamma-Glu)-CO-(CH2) 16-CO2H
  SITE 20: note = 2-Aminoisobutyric Acid
  SITE 29: note = D-amino acid
  SITE 41: note = Amidated residue
YXQGTFTSDFSXXLDKKAQXAFIEYLLEAGPSSGAPPPSGS

SEQ ID NO: 216 - protein, 41 aa, synthetic construct; identical to SEQ ID NO: 210
  SITE 2: note = 2-Aminoisobutyric Acid
  SITE 12: note = L-ornithine
  SITE 13: note = alpha-methyl-leucine
  SITE 17: note = Lysine is chemically modified through conjugation of the epsilon-amino group of the Lysine side chain with (2-[2-(2-Amino-ethoxy)-ethoxy]-acetyl)-(gamma-Glu)-CO-(CH2) 16-CO2H
  SITE 20: note = 2-Aminoisobutyric Acid
  SITE 29: note = D-amino acid
  SITE 41: note = Amidated residue

SEQ ID NO: 217 - protein, 41 aa, synthetic construct
  SITE 2: note = 2-Aminoisobutyric Acid
  SITE 12: note = L-ornithine
  SITE 13: note = alpha-methyl-leucine
  SITE 17: note = Lysine is chemically modified through conjugation of the epsilon-amino group of the Lysine side chain with (2-[2-(2-Amino-ethoxy)-ethoxy]-acetyl)-(gamma-Glu)-CO-(CH2) 16-CO2H
  SITE 20: note = 2-Aminoisobutyric Acid
  SITE 29: note = D-amino acid
  SITE 41: note = Amidated 3-(4-Pyridyl)-L-alanine
YXQGTFTSDFSXXLDKKAQXAFIEYLLEAGPSSGAPPPSGX

SEQ ID NO: 218 - protein, 41 aa, synthetic construct; identical to SEQ ID NO: 215
  SITE 2: note = 2-Aminoisobutyric Acid
  SITE 12: note = L-ornithine
  SITE 13: note = alpha-methyl-leucine
  SITE 17: note = Lysine is chemically modified through conjugation of the epsilon-amino group of the Lysine side chain with (2-[2-(2-Amino-ethoxy)-ethoxy]-acetyl)-(gamma-Glu)-CO-(CH2) 16-CO2H
  SITE 20: note = 2-Aminoisobutyric Acid
  SITE 29: note = D-amino acid

SEQ ID NO: 219 - protein, 41 aa, synthetic construct; identical to SEQ ID NO: 210
  SITE 2: note = 2-Aminoisobutyric Acid
  SITE 12: note = L-ornithine
  SITE 13: note = alpha-methyl-leucine
  SITE 17: note = Lysine is chemically modified through conjugation of the epsilon-amino group of the Lysine side chain with (2-[2-(2-Amino-ethoxy)-ethoxy]-acetyl)-(gamma-Glu)-CO-(CH2) 16-CO2H
  SITE 20: note = 2-Aminoisobutyric Acid
  SITE 29: note = D-amino acid

SEQ ID NO: 220 - protein, 41 aa, synthetic construct
  SITE 2: note = 2-Aminoisobutyric Acid
  SITE 12: note = L-ornithine
  SITE 13: note = alpha-methyl-leucine
  SITE 17: note = Lysine is chemically modified through conjugation of the epsilon-amino group of the Lysine side chain with (2-[2-(2-Amino-ethoxy)-ethoxy]-acetyl)-(gamma-Glu)-CO-(CH2) 16-CO2H
  SITE 20: note = 2-Aminoisobutyric Acid
  SITE 29: note = D-amino acid
  SITE 34: note = 2-Aminoisobutyric Acid
  SITE 41: note = Amidated residue
YXQGTFTSDFSXXLDKKAQXAFIEYLLEAGPSSXAPPPSGT

SEQ ID NO: 221 - protein, 41 aa, synthetic construct
  SITE 2: note = 2-Aminoisobutyric Acid
  SITE 13: note = alpha-methyl-leucine
  SITE 17: note = Lysine is chemically modified through conjugation of the epsilon-amino group of the Lysine side chain with (2-[2-(2-Amino-ethoxy)-ethoxy]-acetyl)-(gamma-Glu)-CO-(CH2) 16-CO2H
  SITE 20: note = 2-Aminoisobutyric Acid
  SITE 41: note = Amidated residue
YXQGTFTSDFSKXLDKKAQXAFIEYLIEGGESSGAPPPSGS

SEQ ID NO: 222 - protein, 41 aa, synthetic construct
  SITE 2: note = 2-Aminoisobutyric Acid
  SITE 13: note = alpha-methyl-leucine
  SITE 17: note = Lysine is chemically modified through conjugation of the epsilon-amino group of the Lysine side chain with (2-[2-(2-Amino-ethoxy)-ethoxy]-acetyl)-(gamma-Glu)-CO-(CH2) 16-CO2H
  SITE 20: note = 2-Aminoisobutyric Acid
  SITE 29: note = 2-Aminoisobutyric Acid
  SITE 41: note = Amidated residue
YXQGTFTSDFSKXLDKKAQXAFIEYLIEXGESSGAPPPSGS

SEQ ID NO: 223 - protein, 41 aa, synthetic construct
  SITE 2: note = 2-Aminoisobutyric Acid
  SITE 13: note = alpha-methyl-leucine
  SITE 17: note = Lysine is chemically modified through conjugation of the epsilon-amino group of the Lysine side chain with (2-[2-(2-Amino-ethoxy)-ethoxy]-acetyl)-(gamma-Glu)-CO-(CH2) 16-CO2H
  SITE 20: note = 2-Aminoisobutyric Acid
  SITE 29: note = 2-Aminoisobutyric Acid
  SITE 41: note = Amidated residue
YXQGTFTSDFSKXLDKKAQXAFIEYLIEXGESSGAPPPSGE

SEQ ID NO: 224 - protein, 41 aa, synthetic construct
  SITE 2: note = 2-Aminoisobutyric Acid
  SITE 12: note = L-ornithine
  SITE 13: note = alpha-methyl-leucine
  SITE 17: note = Lysine is chemically modified through conjugation of the epsilon-amino group of the Lysine side chain with (2-[2-(2-Amino-ethoxy)-ethoxy]-acetyl)-(gamma-Glu)-CO-(CH2) 16-CO2H
  SITE 20: note = 2-Aminoisobutyric Acid
  SITE 29: note = 2-Aminoisobutyric Acid
  SITE 41: note = Amidated residue
YXQGTFTSDFSXXLDKKAQXAFIEYLIEXGESSGAPPPSGS

SEQ ID NO: 225 - protein, 41 aa, synthetic construct
  SITE 2: note = 2-Aminoisobutyric Acid
  SITE 12: note = L-ornithine
  SITE 13: note = alpha-methyl-leucine
  SITE 17: note = Lysine is chemically modified through conjugation of the epsilon-amino group of the Lysine side chain with (2-[2-(2-Amino-ethoxy)-ethoxy]-acetyl)-(gamma-Glu)-CO-(CH2) 16-CO2H
  SITE 20: note = 2-Aminoisobutyric Acid
  SITE 29: note = 2-Aminoisobutyric Acid
  SITE 41: note = Amidated residue
YXQGTFTSDFSXXLDKKAQXAFIEYLIEXGESSGAPPPSGE

SEQ ID NO: 226 - protein, 41 aa, synthetic construct
  SITE 2: note = 2-Aminoisobutyric Acid
  SITE 13: note = alpha-methyl-leucine
  SITE 17: note = Lysine is chemically modified through conjugation of the epsilon-amino group of the Lysine side chain with (2-[2-(2-Amino-ethoxy)-ethoxy]-acetyl)-(gamma-Glu)-CO-(CH2) 16-CO2H
  SITE 20: note = 2-Aminoisobutyric Acid
  SITE 41: note = Amidated residue
YXQGTFTSDFSRXLDKKAQXAFIEYLIEGGESSGAPPPSGS

SEQ ID NO: 227 - protein, 41 aa, synthetic construct
  SITE 2: note = 2-Aminoisobutyric Acid
  SITE 13: note = alpha-methyl-leucine
  SITE 17: note = Lysine is chemically modified through conjugation of the epsilon-amino group of the Lysine side chain with (2-[2-(2-Amino-ethoxy)-ethoxy]-acetyl)-(gamma-Glu)-CO-(CH2) 16-CO2H
  SITE 20: note = 2-Aminoisobutyric Acid
  SITE 29: note = 2-Aminoisobutyric Acid
  SITE 41: note = Amidated residue
YXQGTFTSDFSRXLDKKAQXAFIEYLIEXGESSGAPPPSGS

SEQ ID NO: 228 - protein, 41 aa, synthetic construct
  SITE 2: note = 2-Aminoisobutyric Acid
  SITE 10: note = 3-(4-Pyridyl)-L-alanine
  SITE 12: note = L-ornithine
  SITE 13: note = alpha-methyl-leucine
  SITE 17: note = Lysine is chemically modified through conjugation of the epsilon-amino group of the Lysine side chain with (2-[2-(2-Amino-ethoxy)-ethoxy]-acetyl)-(gamma-Glu)-CO-(CH2) 16-CO2H
  SITE 20: note = alpha-methyl-3-(4-Pyridyl)-L-alanine
  SITE 29: note = 2-Aminoisobutyric Acid
  SITE 41: note = Amidated residue
YXQGTFTSDXSXXLDKKAQXAFIEYLIEXGESSGAPPPSGE

SEQ ID NO: 229 - protein, 41 aa, synthetic construct; identical to SEQ ID NO: 194
  SITE 2: note = 2-Aminoisobutyric Acid
  SITE 10: note = 3-(4-Pyridyl)-L-alanine
  SITE 12: note = L-ornithine
  SITE 13: note = alpha-methyl-leucine
  SITE 17: note = Lysine is chemically modified through conjugation of the epsilon-amino group of the Lysine side chain with (2-[2-(2-Amino-ethoxy)-ethoxy]-acetyl)-(gamma-Glu)-CO-(CH2) 16-CO2H
  SITE 20: note = alpha-methyl-3-(4-Pyridyl)-L-alanine
  SITE 29: note = 2-Aminoisobutyric Acid
  SITE 41: note = Amidated residue

SEQ ID NO: 230 - protein, 41 aa, synthetic construct; identical to SEQ ID NO: 193
  SITE 2: note = 2-Aminoisobutyric Acid
  SITE 10: note = 3-(4-Pyridyl)-L-alanine
  SITE 13: note = alpha-methyl-leucine
  SITE 17: note = Lysine is chemically modified through conjugation of the epsilon-amino group of the Lysine side chain with (2-[2-(2-Amino-ethoxy)-ethoxy]-acetyl)-(gamma-Glu)-CO-(CH2) 16-CO2H
  SITE 20: note = alpha-methyl-3-(4-Pyridyl)-L-alanine
  SITE 29: note = 2-Aminoisobutyric Acid
  SITE 41: note = Amidated residue

SEQ ID NO: 231 - protein, 41 aa, synthetic construct
  SITE 2: note = 2-Aminoisobutyric Acid
  SITE 10: note = 3-(4-Pyridyl)-L-alanine
  SITE 13: note = alpha-methyl-leucine
  SITE 17: note = Lysine is chemically modified through conjugation of the epsilon-amino group of the Lysine side chain with (2-[2-(2-Amino-ethoxy)-ethoxy]-acetyl)-(gamma-Glu)-CO-(CH2) 16-CO2H
  SITE 20: note = alpha-methyl-3-(4-Pyridyl)-L-alanine
  SITE 29: note = 2-Aminoisobutyric Acid
  SITE 41: note = Amidated residue
YXQGTFTSDXSRXLDKKAQXAFIEYLIEXGESSGAPPPSGE

SEQ ID NO: 232 - protein, 41 aa, synthetic construct
  SITE 2: note = 2-Aminoisobutyric Acid
  SITE 10: note = 3-(4-Pyridyl)-L-alanine
  SITE 13: note = alpha-methyl-leucine
  SITE 17: note = Lysine is chemically modified through conjugation of the epsilon-amino group of the Lysine side chain with (2-[2-(2-Amino-ethoxy)-ethoxy]-acetyl)-(gamma-Glu)-CO-(CH2) 16-CO2H
  SITE 20: note = alpha-methyl-3-(4-Pyridyl)-L-alanine
  SITE 29: note = 2-Aminoisobutyric Acid
  SITE 41: note = Amidated residue
YXQGTFTSDXSQXLDKKAQXAFIEYLIEXGESSGAPPPSGS

SEQ ID NO: 233 - protein, 41 aa, synthetic construct
  SITE 2: note = 2-Aminoisobutyric Acid
  SITE 10: note = 3-(4-Pyridyl)-L-alanine
  SITE 13: note = alpha-methyl-leucine
  SITE 17: note = Lysine is chemically modified through conjugation of the epsilon-amino group of the Lysine side chain with (2-[2-(2-Amino-ethoxy)-ethoxy]-acetyl)-(gamma-Glu)-CO-(CH2) 16-CO2H
  SITE 20: note = alpha-methyl-3-(4-Pyridyl)-L-alanine
  SITE 29: note = 2-Aminoisobutyric Acid
  SITE 41: note = Amidated residue
YXQGTFTSDXSQXLDKKAQXAFIEYLIEXGESSGAPPPSGE

SEQ ID NO: 234 - protein, 41 aa, synthetic construct; identical to SEQ ID NO: 225
  SITE 2: note = 2-Aminoisobutyric Acid
  SITE 12: note = L-ornithine
  SITE 13: note = alpha-methyl-leucine
  SITE 17: note = Lysine is chemically modified through conjugation of the epsilon-amino group of the Lysine side chain with (2-[2-(2-Amino-ethoxy)-ethoxy]-acetyl)-(gamma-Glu)-CO-(CH2) 16-CO2H
  SITE 20: note = alpha-methyl-3-(4-Pyridyl)-L-alanine
  SITE 29: note = 2-Aminoisobutyric Acid
  SITE 41: note = Amidated residue

SEQ ID NO: 235 - protein, 41 aa, synthetic construct; identical to SEQ ID NO: 224
  SITE 2: note = 2-Aminoisobutyric Acid
  SITE 12: note = L-ornithine
  SITE 13: note = alpha-methyl-leucine
  SITE 17: note = Lysine is chemically modified through conjugation of the epsilon-amino group of the Lysine side chain with (2-[2-(2-Amino-ethoxy)-ethoxy]-acetyl)-(gamma-Glu)-CO-(CH2) 16-CO2H
  SITE 20: note = alpha-methyl-3-(4-Pyridyl)-L-alanine
  SITE 29: note = 2-Aminoisobutyric Acid
  SITE 41: note = Amidated residue

SEQ ID NO: 236 - protein, 41 aa, synthetic construct; identical to SEQ ID NO: 227
  SITE 2: note = 2-Aminoisobutyric Acid
  SITE 13: note = alpha-methyl-leucine
  SITE 17: note = Lysine is chemically modified through conjugation of the epsilon-amino group of the Lysine side chain with (2-[2-(2-Amino-ethoxy)-ethoxy]-acetyl)-(gamma-Glu)-CO-(CH2) 16-CO2H
  SITE 20: note = alpha-methyl-3-(4-Pyridyl)-L-alanine
  SITE 29: note = 2-Aminoisobutyric Acid
  SITE 41: note = Amidated residue

SEQ ID NO: 237 - protein, 41 aa, synthetic construct
  SITE 2: note = 2-Aminoisobutyric Acid
  SITE 13: note = alpha-methyl-leucine
  SITE 17: note = Lysine is chemically modified through conjugation of the epsilon-amino group of the Lysine side chain with (2-[2-(2-Amino-ethoxy)-ethoxy]-acetyl)-(gamma-Glu)-CO-(CH2) 16-CO2H
  SITE 20: note = alpha-methyl-3-(4-Pyridyl)-L-alanine
  SITE 29: note = 2-Aminoisobutyric Acid
  SITE 41: note = Amidated residue
YXQGTFTSDFSRXLDKKAQXAFIEYLIEXGESSGAPPPSGE

SEQ ID NO: 238 - protein, 41 aa, synthetic construct
  SITE 2: note = 2-Aminoisobutyric Acid
  SITE 13: note = alpha-methyl-leucine
  SITE 17: note = Lysine is chemically modified through conjugation of the epsilon-amino group of the Lysine side chain with (2-[2-(2-Amino-ethoxy)-ethoxy]-acetyl)-(gamma-Glu)-CO-(CH2) 16-CO2H
  SITE 20: note = alpha-methyl-3-(4-Pyridyl)-L-alanine
  SITE 29: note = 2-Aminoisobutyric Acid
  SITE 41: note = Amidated residue
YXQGTFTSDFSQXLDKKAQXAFIEYLIEXGESSGAPPPSGS

SEQ ID NO: 239 - protein, 41 aa, synthetic construct
  SITE 2: note = 2-Aminoisobutyric Acid
  SITE 13: note = alpha-methyl-leucine
  SITE 17: note = Lysine is chemically modified through conjugation of the epsilon-amino group of the Lysine side chain with (2-[2-(2-Amino-ethoxy)-ethoxy]-acetyl)-(gamma-Glu)-CO-(CH2) 16-CO2H
  SITE 20: note = alpha-methyl-3-(4-Pyridyl)-L-alanine
  SITE 29: note = 2-Aminoisobutyric Acid
  SITE 41: note = Amidated residue
YXQGTFTSDFSQXLDKKAQXAFIEYLIEXGESSGAPPPSGE

SEQ ID NO: 240 - protein, 41 aa, synthetic construct; identical to SEQ ID NO: 169
  SITE 2: note = 2-Aminoisobutyric Acid
  SITE 12: note = L-ornithine
  SITE 13: note = alpha-methyl-leucine
  SITE 17: note = Lysine is chemically modified through conjugation of the epsilon-amino group of the Lysine side chain with (2-[2-(2-Amino-ethoxy)-ethoxy]-acetyl)-(gamma-Glu)-CO-(CH2) 16-CO2H
  SITE 20: note = 2-Aminoisobutyric Acid
  SITE 31: note = Hydroxy-L-proline
  SITE 41: note = Amidated residue

SEQ ID NO: 241 - protein, 41 aa, synthetic construct
  SITE 2: note = 2-Aminoisobutyric Acid
  SITE 12: note = L-ornithine
  SITE 13: note = alpha-methyl-leucine
  SITE 17: note = Lysine is chemically modified through conjugation of the epsilon-amino group of the Lysine side chain with (2-[2-(2-Amino-ethoxy)-ethoxy]-acetyl)-(gamma-Glu)-CO-(CH2) 16-CO2H
  SITE 20: note = 2-Aminoisobutyric Acid
  SITE 36: note = Hydroxy-L-proline
  SITE 41: note = Amidated residue
YXQGTFTSDFSXXLDKKAQXAFIEYLLEGGPSSGAXPPGGS

SEQ ID NO: 242 - protein, 41 aa, synthetic construct
  SITE 2: note = 2-Aminoisobutyric Acid
  SITE 12: note = L-ornithine
  SITE 13: note = alpha-methyl-leucine
  SITE 17: note = Lysine is chemically modified through conjugation of the epsilon-amino group of the Lysine side chain with (2-[2-(2-Amino-ethoxy)-ethoxy]-acetyl)-(gamma-Glu)-CO-(CH2) 16-CO2H
  SITE 20: note = 2-Aminoisobutyric Acid
  SITE 37: note = Hydroxy-L-proline
  SITE 41: note = Amidated residue
YXQGTFTSDFSXXLDKKAQXAFIEYLLEGGPSSGAPXPGGS

SEQ ID NO: 243 - protein, 41 aa, synthetic construct
  SITE 2: note = 2-Aminoisobutyric Acid
  SITE 12: note = L-ornithine
  SITE 13: note = alpha-methyl-leucine
  SITE 17: note = Lysine is chemically modified through conjugation of the epsilon-amino group of the Lysine side chain with (2-[2-(2-Amino-ethoxy)-ethoxy]-acetyl)-(gamma-Glu)-CO-(CH2) 16-CO2H
  SITE 20: note = 2-Aminoisobutyric Acid
  SITE 38: note = Hydroxy-L-proline
  SITE 41: note = Amidated residue
YXQGTFTSDFSXXLDKKAQXAFIEYLLEGGPSSGAPPXGGS

SEQ ID NO: 244 - protein, 41 aa, synthetic construct
  SITE 2: note = 2-Aminoisobutyric Acid
  SITE 12: note = L-ornithine
  SITE 13: note = alpha-methyl-leucine
  SITE 17: note = Lysine is chemically modified through conjugation of the epsilon-amino group of the Lysine side chain with (2-[2-(2-Amino-ethoxy)-ethoxy]-acetyl)-(gamma-Glu)-CO-(CH2) 16-CO2H
  SITE 20: note = 2-Aminoisobutyric Acid
  SITE 29: note = 2-Aminoisobutyric Acid
  SITE 34: note = 2-Aminoisobutyric Acid
  SITE 41: note = Amidated residue
YXQGTFTSDFSXXLDKKAQXAFIEYLLEXGPSSXAPPPSGS

SEQ ID NO: 245 - protein, 41 aa, synthetic construct
  SITE 2: note = 2-Aminoisobutyric Acid
  SITE 12: note = L-ornithine
  SITE 13: note = alpha-methyl-leucine
  SITE 17: note = Lysine is chemically modified through conjugation of the epsilon-amino group of the Lysine side chain with (2-[2-(2-Amino-ethoxy)-ethoxy]-acetyl)-(gamma-Glu)-CO-(CH2) 16-CO2H
  SITE 20: note = 2-Aminoisobutyric Acid
  SITE 29: note = 2-Aminoisobutyric Acid
  SITE 35: note = 2-Aminoisobutyric Acid
  SITE 41: note = Amidated residue
YXQGTFTSDFSXXLDKKAQXAFIEYLLEXGPSSGXPPPSGS

SEQ ID NO: 246 - protein, 41 aa, synthetic construct; identical to SEQ ID NO: 185
  SITE 2: note = 2-Aminoisobutyric Acid
  SITE 12: note = L-ornithine
  SITE 13: note = alpha-methyl-leucine
  SITE 17: note = Lysine is chemically modified through conjugation of the epsilon-amino group of the Lysine side chain with (2-[2-(2-Amino-ethoxy)-ethoxy]-acetyl)-(gamma-Glu)-CO-(CH2) 16-CO2H
  SITE 20: note = 2-Aminoisobutyric Acid
  SITE 29: note = 2-Aminoisobutyric Acid
  SITE 41: note = Amidated residue

SEQ ID NO: 247 - protein, 41 aa, synthetic construct; identical to SEQ ID NO: 187
  SITE 2: note = 2-Aminoisobutyric Acid
  SITE 12: note = L-ornithine
  SITE 13: note = alpha-methyl-leucine
  SITE 17: note = Lysine is chemically modified through conjugation of the epsilon-amino group of the Lysine side chain with (2-[2-(2-Amino-ethoxy)-ethoxy]-acetyl)-(gamma-Glu)-CO-(CH2) 16-CO2H
  SITE 20: note = 2-Aminoisobutyric Acid
  SITE 29: note = 2-Aminoisobutyric Acid
  SITE 41: note = Amidated residue

SEQ ID NO: 248 - protein, 41 aa, synthetic construct; identical to SEQ ID NO: 189
  SITE 2: note = 2-Aminoisobutyric Acid
  SITE 12: note = L-ornithine
  SITE 13: note = alpha-methyl-leucine
  SITE 17: note = Lysine is chemically modified through conjugation of the epsilon-amino group of the Lysine side chain with (2-[2-(2-Amino-ethoxy)-ethoxy]-acetyl)-(gamma-Glu)-CO-(CH2) 16-CO2H
  SITE 20: note = 2-Aminoisobutyric Acid
  SITE 29: note = 2-Aminoisobutyric Acid
  SITE 31: note = 3-(4-Pyridyl)-L-alanine
  SITE 41: note = Amidated residue

SEQ ID NO: 249 - protein, 41 aa, synthetic construct; identical to SEQ ID NO: 187
  SITE 2: note = 2-Aminoisobutyric Acid
  SITE 12: note = L-ornithine
  SITE 13: note = alpha-methyl-leucine
  SITE 17: note = Lysine is chemically modified through conjugation of the epsilon-amino group of the Lysine side chain with (2-[2-(2-Amino-ethoxy)-ethoxy]-acetyl)-(gamma-Glu)2-CO-(CH2 )16-CO2H
  SITE 20: note = 2-Aminoisobutyric Acid
  SITE 29: note = 2-Aminoisobutyric Acid
  SITE 41: note = Amidated residue

SEQ ID NO: 250 - protein, 41 aa, synthetic construct; identical to SEQ ID NO: 185
  SITE 2: note = 2-Aminoisobutyric Acid
  SITE 12: note = L-ornithine
  SITE 13: note = alpha-methyl-leucine
  SITE 17: note = Lysine is chemically modified through conjugation of the epsilon-amino group of the Lysine side chain with (gamma-Glu)-(2-[2-(2-Amino-ethoxy)-ethoxy]-acetyl)-(gamma-G lu)-CO-(CH2)16-CO2H
  SITE 20: note = 2-Aminoisobutyric Acid
  SITE 29: note = 2-Aminoisobutyric Acid
  SITE 41: note = Amidated residue

SEQ ID NO: 251 - protein, 41 aa, synthetic construct; identical to SEQ ID NO: 187
  SITE 2: note = 2-Aminoisobutyric Acid
  SITE 12: note = L-ornithine
  SITE 13: note = alpha-methyl-leucine
  SITE 17: note = Lysine is chemically modified through conjugation of the epsilon-amino group of the Lysine side chain with (gamma-Glu)-(2-[2-(2-Amino-ethoxy)-ethoxy]-acetyl)-(gamma-G lu)-CO-(CH2)16-CO2H
  SITE 20: note = 2-Aminoisobutyric Acid
  SITE 29: note = 2-Aminoisobutyric Acid
  SITE 41: note = Amidated residue

SEQ ID NO: 252 - protein, 41 aa, synthetic construct; identical to SEQ ID NO: 191
  SITE 2: note = 2-Aminoisobutyric Acid
  SITE 12: note = L-ornithine
  SITE 13: note = alpha-methyl-leucine
  SITE 17: note = Lysine is chemically modified through conjugation of the epsilon-amino group of the Lysine side chain with (2-[2-(2-Amino-ethoxy)-ethoxy]-acetyl)-(gamma-Glu)-CO-(CH2) 16-CO2H
  SITE 20: note = 2-Aminoisobutyric Acid
  SITE 29: note = 2-Aminoisobutyric Acid
  SITE 41: note = Amidated residue

SEQ ID NO: 253 - protein, 41 aa, synthetic construct; identical to SEQ ID NO: 192
  SITE 2: note = 2-Aminoisobutyric Acid
  SITE 12: note = L-ornithine
  SITE 13: note = alpha-methyl-leucine
  SITE 17: note = Lysine is chemically modified through conjugation of the epsilon-amino group of the Lysine side chain with (2-[2-(2-Amino-ethoxy)-ethoxy]-acetyl)-(gamma-Glu)-CO-(CH2) 16-CO2H
  SITE 20: note = 2-Aminoisobutyric Acid
  SITE 29: note = 2-Aminoisobutyric Acid
  SITE 41: note = Amidated residue

SEQ ID NO: 254 - protein, 41 aa, synthetic construct; identical to SEQ ID NO: 195
  SITE 2: note = 2-Aminoisobutyric Acid
  SITE 12: note = L-ornithine
  SITE 13: note = alpha-methyl-leucine
  SITE 17: note = Lysine is chemically modified through conjugation of the epsilon-amino group of the Lysine side chain with (2-[2-(2-Amino-ethoxy)-ethoxy]-acetyl)-(gamma-Glu)-CO-(CH2) 16-CO2H
  SITE 20: note = 2-Aminoisobutyric Acid
  SITE 29: note = 2-Aminoisobutyric Acid
  SITE 31: note = 3-(4-Pyridyl)-L-alanine
  SITE 41: note = Amidated residue

SEQ ID NO: 255 - protein, 41 aa, synthetic construct
  SITE 2: note = 2-Aminoisobutyric Acid
  SITE 12: note = L-ornithine
  SITE 13: note = alpha-methyl-leucine
  SITE 17: note = Lysine is chemically modified through conjugation of the epsilon-amino group of the Lysine side chain with (2-[2-(2-Amino-ethoxy)-ethoxy]-acetyl)-(gamma-Glu)-CO-(CH2) 16-CO2H
  SITE 20: note = 2-Aminoisobutyric Acid
  SITE 41: note = Amidated residue
YXQGTFTSDFSXXLDKKAQXAFIEWLLEGGPSSGAPPPHGS

SEQ ID NO: 256 - protein, 41 aa, synthetic construct
  SITE 2: note = 2-Aminoisobutyric Acid
  SITE 12: note = L-ornithine
  SITE 13: note = alpha-methyl-leucine
  SITE 17: note = Lysine is chemically modified through conjugation of the epsilon-amino group of the Lysine side chain with (2-[2-(2-Amino-ethoxy)-ethoxy]-acetyl)-(gamma-Glu)-CO-(CH2) 16-CO2H
  SITE 20: note = 2-Aminoisobutyric Acid
  SITE 41: note = Amidated residue
YXQGTFTSDFSXXLDKKAQXAFIEWLLEGGPSSGAPPPTGS

SEQ ID NO: 257 - protein, 41 aa, synthetic construct
  SITE 2: note = 2-Aminoisobutyric Acid
  SITE 12: note = L-ornithine
  SITE 13: note = alpha-methyl-leucine
  SITE 17: note = Lysine is chemically modified through conjugation of the epsilon-amino group of the Lysine side chain with (2-[2-(2-Amino-ethoxy)-ethoxy]-acetyl)-(gamma-Glu)-CO-(CH2) 16-CO2H
  SITE 20: note = 2-Aminoisobutyric Acid
  SITE 39: note = 3-(4-Pyridyl)-L-alanine
  SITE 41: note = Amidated residue
YXQGTFTSDFSXXLDKKAQXAFIEWLLEGGPSSGAPPPXGS

SEQ ID NO: 258 - protein, 41 aa, synthetic construct; identical to SEQ ID NO: 214
  SITE 2: note = 2-Aminoisobutyric Acid
  SITE 12: note = L-ornithine
  SITE 13: note = alpha-methyl-leucine
  SITE 17: note = Lysine is chemically modified through conjugation of the epsilon-amino group of the Lysine side chain with (2-[2-(2-Amino-ethoxy)-ethoxy]-acetyl)-(gamma-Glu)-CO-(CH2) 16-CO2H
  SITE 20: note = 2-Aminoisobutyric Acid
  SITE 29: note = D-amino acid
  SITE 31: note = 3-(4-Pyridyl)-L-alanine
  SITE 41: note = Amidated residue

SEQ ID NO: 259 - protein, 41 aa, synthetic construct
  SITE 2: note = 2-Aminoisobutyric Acid
  SITE 12: note = L-ornithine
  SITE 13: note = alpha-methyl-leucine
  SITE 17: note = Lysine is chemically modified through conjugation of the epsilon-amino group of the Lysine side chain with (2-[2-(2-Amino-ethoxy)-ethoxy]-acetyl)2-(gamma-Glu)-CO-(CH2 )16-CO2H
  SITE 20: note = 2-Aminoisobutyric Acid
  SITE 29: note = D-amino acid
  SITE 41: note = Amidated residue
YXQGTFTSDFSXXLDKKAQXAFIEYLLEAGPSSGHPPPSGS

SEQ ID NO: 260 - protein, 41 aa, synthetic construct
  SITE 2: note = 2-Aminoisobutyric Acid
  SITE 12: note = L-ornithine
  SITE 13: note = alpha-methyl-leucine
  SITE 17: note = Lysine is chemically modified through conjugation of the epsilon-amino group of the Lysine side chain with (2-[2-(2-Amino-ethoxy)-ethoxy]-acetyl)2-(gamma-Glu)-CO-(CH2 )16-CO2H
  SITE 20: note = 2-Aminoisobutyric Acid
  SITE 29: note = D-amino acid
  SITE 35: note = 3-(4-Pyridyl)-L-alanine
  SITE 41: note = Amidated residue
YXQGTFTSDFSXXLDKKAQXAFIEYLLEAGPSSGXPPPSGS

SEQ ID NO: 261 - protein, 41 aa, synthetic construct
  SITE 2: note = 2-Aminoisobutyric Acid
  SITE 12: note = L-ornithine
  SITE 13: note = alpha-methyl-leucine
  SITE 17: note = Lysine is chemically modified through conjugation of the epsilon-amino group of the Lysine side chain with (2-[2-(2-Amino-ethoxy)-ethoxy]-acetyl)2-(gamma-Glu)-CO-(CH2 )16-CO2H
  SITE 20: note = 2-Aminoisobutyric Acid
  SITE 29: note = D-amino acid
  SITE 41: note = Amidated residue
YXQGTFTSDFSXXLDKKAQXAFIEYLLEAGPSSGHPPPSGH

SEQ ID NO: 262 - protein, 41 aa, synthetic construct
  SITE 2: note = 2-Aminoisobutyric Acid
  SITE 12: note = L-ornithine
  SITE 13: note = alpha-methyl-leucine
  SITE 17: note = Lysine is chemically modified through conjugation of the epsilon-amino group of the Lysine side chain with (2-[2-(2-Amino-ethoxy)-ethoxy]-acetyl)2-(gamma-Glu)-CO-(CH2 )16-CO2H
  SITE 20: note = 2-Aminoisobutyric Acid
  SITE 29: note = D-amino acid
  SITE 41: note = Amidated 3-(4-Pyridyl)-L-alanine
YXQGTFTSDFSXXLDKKAQXAFIEYLLEAGPSSGHPPPSGX

SEQ ID NO: 263 - protein, 41 aa, synthetic construct
  SITE 2: note = 2-Aminoisobutyric Acid
  SITE 12: note = L-ornithine
  SITE 13: note = alpha-methyl-leucine
  SITE 17: note = Lysine is chemically modified through conjugation of the epsilon-amino group of the Lysine side chain with (2-[2-(2-Amino-ethoxy)-ethoxy]-acetyl)2-(gamma-Glu)-CO-(CH2 )16-CO2H
  SITE 20: note = 2-Aminoisobutyric Acid
  SITE 29: note = D-amino acid
  SITE 35: note = 3-(4-Pyridyl)-L-alanine
  SITE 41: note = Amidated residue
YXQGTFTSDFSXXLDKKAQXAFIEYLLEAGPSSGXPPPSGH

SEQ ID NO: 264 - protein, 41 aa, synthetic construct
  SITE 2: note = 2-Aminoisobutyric Acid
  SITE 12: note = L-ornithine
  SITE 13: note = alpha-methyl-leucine
  SITE 17: note = Lysine is chemically modified through conjugation of the epsilon-amino group of the Lysine side chain with (2-[2-(2-Amino-ethoxy)-ethoxy]-acetyl)2-(gamma-Glu)-CO-(CH2 )16-CO2H
  SITE 20: note = 2-Aminoisobutyric Acid
  SITE 29: note = D-amino acid
  SITE 35: note = 3-(4-Pyridyl)-L-alanine
  SITE 41: note = Amidated 3-(4-Pyridyl)-L-alanine
YXQGTFTSDFSXXLDKKAQXAFIEYLLEAGPSSGXPPPSGX

SEQ ID NO: 265 - protein, 41 aa, synthetic construct
  SITE 2: note = 2-Aminoisobutyric Acid
  SITE 12: note = L-ornithine
  SITE 13: note = alpha-methyl-leucine
  SITE 17: note = Lysine is chemically modified through conjugation of the epsilon-amino group of the Lysine side chain with (2-[2-(2-Amino-ethoxy)-ethoxy]-acetyl)-(gamma-Glu)-CO-(CH2) 16-CO2H
  SITE 20: note = 2-Aminoisobutyric Acid
  SITE 29: note = D-amino acid
  SITE 41: note = Amidated residue
YXQGTFTSDFSXXLDKKAQXAFIEYLLEAGPSSGAPPPSGH

SEQ ID NO: 266 - protein, 41 aa, synthetic construct
  SITE 2: note = 2-Aminoisobutyric Acid
  SITE 12: note = L-ornithine
  SITE 13: note = alpha-methyl-leucine
  SITE 17: note = Lysine is chemically modified through conjugation of the epsilon-amino group of the Lysine side chain with (gamma-Glu)2-CO-(CH2)16-CO2H
  SITE 20: note = 2-Aminoisobutyric Acid
  SITE 41: note = Amidated residue
YXQGTFTSDFSXXLDKKAQXAFIEYLLEGGPSSGAPPPSGT

SEQ ID NO: 267 - protein, 41 aa, synthetic construct
  SITE 2: note = 2-Aminoisobutyric Acid
  SITE 12: note = L-ornithine
  SITE 13: note = alpha-methyl-leucine
  SITE 17: note = Lysine is chemically modified through conjugation of the epsilon-amino group of the Lysine side chain with (2-[2-(2-Amino-ethoxy)-ethoxy]-acetyl)-(gamma-Glu)-CO-(CH2) 16-CO2H
  SITE 20: note = 2-Aminoisobutyric Acid
  SITE 41: note = Amidated 3-(4-Pyridyl)-L-alanine
YXQGTFTSDFSXXLDKKAQXAFIEYLLEGGPSSGAPPPGGX

SEQ ID NO: 268 - protein, 41 aa, synthetic construct
  SITE 2: note = 2-Aminoisobutyric Acid
  SITE 12: note = L-ornithine
  SITE 13: note = alpha-methyl-leucine
  SITE 17: note = Lysine is chemically modified through conjugation of the epsilon-amino group of the Lysine side chain with (2-[2-(2-Amino-ethoxy)-ethoxy]-acetyl)-(gamma-Glu)-CO-(CH2) 16-CO2H
  SITE 20: note = 2-Aminoisobutyric Acid
  SITE 41: note = Amidated 3-(4-Pyridyl)-L-alanine
YXQGTFTSDFSXXLDKKAQXAFIEWLLEGGPSSGAPPPEGX

SEQ ID NO: 269 - protein, 41 aa, synthetic construct
  SITE 2: note = 2-Aminoisobutyric Acid
  SITE 12: note = L-ornithine
  SITE 13: note = alpha-methyl-leucine
  SITE 17: note = Lysine is chemically modified through conjugation of the epsilon-amino group of the Lysine side chain with (2-[2-(2-Amino-ethoxy)-ethoxy]-acetyl)-(gamma-Glu)-CO-(CH2) 16-CO2H
  SITE 20: note = 2-Aminoisobutyric Acid
  SITE 29: note = D-amino acid
  SITE 41: note = Amidated residue
YXQGTFTSDFSXXLDKKAQXAFIEWLLEAGSSSGAPPPSGT

SEQ ID NO: 270 - protein, 41 aa, synthetic construct
  SITE 2: note = 2-Aminoisobutyric Acid
  SITE 12: note = L-ornithine
  SITE 13: note = alpha-methyl-leucine
  SITE 17: note = Lysine is chemically modified through conjugation of the epsilon-amino group of the Lysine side chain with (2-[2-(2-Amino-ethoxy)-ethoxy]-acetyl)-(gamma-Glu)-CO-(CH2) 16-CO2H
  SITE 20: note = 2-Aminoisobutyric Acid
  SITE 29: note = 2-Aminoisobutyric Acid
  SITE 41: note = Amidated residue
YXQGTFTSDFSXXLDKKAQXAFIEWLLEXGSSSGAPPPSGT

SEQ ID NO: 271 - protein, 41 aa, synthetic construct
  SITE 2: note = 2-Aminoisobutyric Acid
  SITE 12: note = L-ornithine
  SITE 13: note = alpha-methyl-leucine
  SITE 17: note = Lysine is chemically modified through conjugation of the epsilon-amino group of the Lysine side chain with (2-[2-(2-Amino-ethoxy)-ethoxy]-acetyl)2-(gamma-Glu)-CO-(CH2 )16-CO2H
  SITE 20: note = 2-Aminoisobutyric Acid
  SITE 29: note = D-amino acid
  SITE 41: note = Amidated residue
YXQGTFTSDFSXXLDKKAQXAFIEWLLEAGHSSGAPPPSGE

SEQ ID NO: 272 - protein, 41 aa, synthetic construct
  SITE 2: note = 2-Aminoisobutyric Acid
  SITE 12: note = L-ornithine
  SITE 13: note = alpha-methyl-leucine
  SITE 17: note = Lysine is chemically modified through conjugation of the epsilon-amino group of the Lysine side chain with (2-[2-(2-Amino-ethoxy)-ethoxy]-acetyl)2-(gamma-Glu)-CO-(CH2 )16-CO2H
  SITE 20: note = 2-Aminoisobutyric Acid
  SITE 29: note = 2-Aminoisobutyric Acid
  SITE 41: note = Amidated residue
YXQGTFTSDFSXXLDKKAQXAFIEWLLEXGHSSGAPPPSGE

SEQ ID NO: 273 - protein, 41 aa, synthetic construct; identical to SEQ ID NO: 110
  SITE 2: note = 2-Aminoisobutyric Acid
  SITE 12: note = L-ornithine
  SITE 13: note = alpha-methyl-leucine
  SITE 17: note = Lysine is chemically modified through conjugation of the epsilon-amino group of the Lysine side chain with (2-[2-(2-Amino-ethoxy)-ethoxy]-acetyl)-(gamma-Glu)-CO-(CH2) 16-CO2H
  SITE 20: note = 2-Aminoisobutyric Acid
  SITE 31: note = 3-(4-Pyridyl)-L-alanine
  SITE 41: note = Amidated residue

SEQ ID NO: 274 - protein, 41 aa, synthetic construct
  SITE 2: note = 2-Aminoisobutyric Acid
  SITE 12: note = L-ornithine
  SITE 13: note = alpha-methyl-leucine
  SITE 17: note = Lysine is chemically modified through conjugation of the epsilon-amino group of the Lysine side chain with (2-[2-(2-Amino-ethoxy)-ethoxy]-acetyl)-(gamma-Glu)-CO-(CH2) 16-CO2H
  SITE 20: note = 2-Aminoisobutyric Acid
  SITE 31: note = 3-(4-Pyridyl)-L-alanine
  SITE 41: note = Amidated residue
YXQGTFTSDFSXXLDKKAQXAFIEWLLEGGXSSGAPPPSGT

SEQ ID NO: 275 - protein, 41 aa, synthetic construct
  SITE 2: note = 2-Aminoisobutyric Acid
  SITE 12: note = L-ornithine
  SITE 13: note = alpha-methyl-leucine
  SITE 17: note = Lysine is chemically modified through conjugation of the epsilon-amino group of the Lysine side chain with (2-[2-(2-Amino-ethoxy)-ethoxy]-acetyl)-(gamma-Glu)-CO-(CH2) 16-CO2H
  SITE 20: note = 2-Aminoisobutyric Acid
  SITE 41: note = Amidated residue
YXQGTFTSDFSXXLDKKAQXAFIEWLLEGGHSSGAPPPSGH

SEQ ID NO: 276 - protein, 41 aa, synthetic construct
  SITE 2: note = 2-Aminoisobutyric Acid
  SITE 12: note = L-ornithine
  SITE 13: note = alpha-methyl-leucine
  SITE 17: note = Lysine is chemically modified through conjugation of the epsilon-amino group of the Lysine side chain with (2-[2-(2-Amino-ethoxy)-ethoxy]-acetyl)-(gamma-Glu)-CO-(CH2) 16-CO2H
  SITE 20: note = 2-Aminoisobutyric Acid
  SITE 41: note = Amidated residue
YXQGTFTSDFSXXLDKKAQXAFIEWLLEGGSSSGAPPPSGH

SEQ ID NO: 277 - protein, 41 aa, synthetic construct
  SITE 2: note = 2-Aminoisobutyric Acid
  SITE 12: note = L-ornithine
  SITE 13: note = alpha-methyl-leucine
  SITE 17: note = Lysine is chemically modified through conjugation of the epsilon-amino group of the Lysine side chain with (2-[2-(2-Amino-ethoxy)-ethoxy]-acetyl)2-(gamma-Glu)-CO-(CH2 )16-CO2H
  SITE 20: note = 2-Aminoisobutyric Acid
  SITE 41: note = Amidated residue
YXQGTFTSDFSXXLDKKAQXAFIEWLLEGGHSSGAPPPGGE

SEQ ID NO: 278 - protein, 41 aa, synthetic construct
  SITE 2: note = 2-Aminoisobutyric Acid
  SITE 12: note = L-ornithine
  SITE 13: note = alpha-methyl-leucine
  SITE 17: note = Lysine is chemically modified through conjugation of the epsilon-amino group of the Lysine side chain with (2-[2-(2-Amino-ethoxy)-ethoxy]-acetyl)-(gamma-Glu)-CO-(CH2) 16-CO2H
  SITE 20: note = 2-Aminoisobutyric Acid
  SITE 41: note = Amidated residue
YXQGTFTSDFSXXLDKKAQXAFIEWLLEGGSSSGAPPPGGT

SEQ ID NO: 279 - protein, 41 aa, synthetic construct; identical to SEQ ID NO: 277
  SITE 2: note = 2-Aminoisobutyric Acid
  SITE 12: note = L-ornithine
  SITE 13: note = alpha-methyl-leucine
  SITE 17: note = Lysine is chemically modified through conjugation of the epsilon-amino group of the Lysine side chain with (2-[2-(2-Amino-ethoxy)-ethoxy]-acetyl)-(gamma-Glu)-CO-(CH2) 16-CO2H
  SITE 20: note = 2-Aminoisobutyric Acid
  SITE 41: note = Amidated residue

SEQ ID NO: 280 - protein, 41 aa, synthetic construct
  SITE 2: note = 2-Aminoisobutyric Acid
  SITE 10: note = 3-(4-Pyridyl)-L-alanine
  SITE 12: note = L-ornithine
  SITE 13: note = alpha-methyl-leucine
  SITE 17: note = Lysine is chemically modified through conjugation of the epsilon-amino group of the Lysine side chain with (2-[2-(2-Amino-ethoxy)-ethoxy]-acetyl)-(gamma-Glu)-CO-(CH2) 16-CO2H
  SITE 20: note = 2-Aminoisobutyric Acid
  SITE 29: note = D-amino acid
  SITE 41: note = Amidated 3-(4-Pyridyl)-L-alanine
YXQGTFTSDXSXXLDKKAQXAFIEYLLEAGPSSGAPPPSGX

SEQ ID NO: 281 - protein, 41 aa, synthetic construct
  SITE 2: note = 2-Aminoisobutyric Acid
  SITE 10: note = 3-(4-Pyridyl)-L-alanine
  SITE 12: note = L-ornithine
  SITE 13: note = alpha-methyl-leucine
  SITE 17: note = Lysine is chemically modified through conjugation of the epsilon-amino group of the Lysine side chain with (2-[2-(2-Amino-ethoxy)-ethoxy]-acetyl)-(gamma-Glu)-CO-(CH2) 16-CO2H
  SITE 20: note = 2-Aminoisobutyric Acid
  SITE 29: note = D-amino acid
  SITE 34: note = 2-Aminoisobutyric Acid
  SITE 41: note = Amidated residue
YXQGTFTSDXSXXLDKKAQXAFIEYLLEAGPSSXAPPPSGT

SEQ ID NO: 282 - protein, 41 aa, synthetic construct; identical to SEQ ID NO: 171
  SITE 2: note = 2-Aminoisobutyric Acid
  SITE 12: note = L-ornithine
  SITE 13: note = alpha-methyl-leucine
  SITE 17: note = Lysine is chemically modified through conjugation of the epsilon-amino group of the Lysine side chain with (gamma-Glu)-(2-[2-(2-Amino-ethoxy)-ethoxy]-acetyl)-(gamma-G lu)-CO-(CH2)16-CO2H
  SITE 20: note = 2-Aminoisobutyric Acid
  SITE 29: note = 2-Aminoisobutyric Acid
  SITE 41: note = Amidated residue

SEQ ID NO: 283 - protein, 41 aa, synthetic construct
  SITE 2: note = 2-Aminoisobutyric Acid
  SITE 12: note = L-ornithine
  SITE 13: note = alpha-methyl-leucine
  SITE 17: note = Lysine is chemically modified through conjugation of the epsilon-amino group of the Lysine side chain with (gamma-Glu)-(2-[2-(2-Amino-ethoxy)-ethoxy]-acetyl)-(gamma-G lu)-CO-(CH2)16-CO2H
  SITE 20: note = 2-Aminoisobutyric Acid
  SITE 29: note = 2-Aminoisobutyric Acid
  SITE 41: note = Amidated 3-(4-Pyridyl)-L-alanine
YXQGTFTSDFSXXLDKKAQXAFIEYLLEXGPSSGAPPPSGX

SEQ ID NO: 284 - protein, 41 aa, synthetic construct; identical to SEQ ID NO: 171
  SITE 2: note = 2-Aminoisobutyric Acid
  SITE 12: note = L-ornithine
  SITE 13: note = alpha-methyl-leucine
  SITE 17: note = Lysine is chemically modified through conjugation of the epsilon-amino group of the Lysine side chain with (2-[2-(2-Amino-ethoxy)-ethoxy]-acetyl)-(gamma-Glu)2-CO-(CH2 )16-CO2H
  SITE 20: note = 2-Aminoisobutyric Acid
  SITE 29: note = 2-Aminoisobutyric Acid
  SITE 41: note = Amidated residue

SEQ ID NO: 285 - protein, 41 aa, synthetic construct; identical to SEQ ID NO: 283
  SITE 2: note = 2-Aminoisobutyric Acid
  SITE 12: note = L-ornithine
  SITE 13: note = alpha-methyl-leucine
  SITE 17: note = Lysine is chemically modified through conjugation of the epsilon-amino group of the Lysine side chain with (2-[2-(2-Amino-ethoxy)-ethoxy]-acetyl)-(gamma-Glu)2-CO-(CH2 )16-CO2H
  SITE 20: note = 2-Aminoisobutyric Acid
  SITE 29: note = 2-Aminoisobutyric Acid
  SITE 41: note = Amidated 3-(4-Pyridyl)-L-alanine

SEQ ID NO: 286 - protein, 41 aa, synthetic construct
  SITE 2: note = 2-Aminoisobutyric Acid
  SITE 10: note = 3-(4-Pyridyl)-L-alanine
  SITE 13: note = alpha-methyl-leucine
  SITE 17: note = Lysine is chemically modified through conjugation of the epsilon-amino group of the Lysine side chain with (2-[2-(2-Amino-ethoxy)-ethoxy]-acetyl)-(gamma-Glu)-CO-(CH2) 16-CO2H
  SITE 20: note = 2-Aminoisobutyric Acid
  SITE 29: note = 2-Aminoisobutyric Acid
  SITE 41: note = Amidated residue
YXQGTFTSDXSKXLDKKAQXAFIEYLIEXGESSGAPPPSGS

SEQ ID NO: 287 - protein, 41 aa, synthetic construct
  SITE 2: note = 2-Aminoisobutyric Acid
  SITE 10: note = 3-(4-Pyridyl)-L-alanine
  SITE 13: note = alpha-methyl-leucine
  SITE 17: note = Lysine is chemically modified through conjugation of the epsilon-amino group of the Lysine side chain with (2-[2-(2-Amino-ethoxy)-ethoxy]-acetyl)-(gamma-Glu)-CO-(CH2) 16-CO2H
  SITE 20: note = 2-Aminoisobutyric Acid
  SITE 29: note = 2-Aminoisobutyric Acid
  SITE 41: note = Amidated residue
YXQGTFTSDXSKXLDKKAQXAFIEYLIEXGESSGEPPPSGE

SEQ ID NO: 288 - protein, 41 aa, synthetic construct
  SITE 2: note = 2-Aminoisobutyric Acid
  SITE 10: note = 3-(4-Pyridyl)-L-alanine
  SITE 13: note = alpha-methyl-leucine
  SITE 17: note = Lysine is chemically modified through conjugation of the epsilon-amino group of the Lysine side chain with (2-[2-(2-Amino-ethoxy)-ethoxy]-acetyl)-(gamma-Glu)-CO-(CH2) 16-CO2H
  SITE 20: note = 2-Aminoisobutyric Acid
  SITE 29: note = 2-Aminoisobutyric Acid
  SITE 41: note = Amidated residue
YXQGTFTSDXSKXLDKKAQXAFIEYLIEXGESSGEPPPSGS

SEQ ID NO: 289 - protein, 41 aa, synthetic construct
  SITE 2: note = 2-Aminoisobutyric Acid
  SITE 10: note = 3-(4-Pyridyl)-L-alanine
  SITE 13: note = alpha-methyl-leucine
  SITE 17: note = Lysine is chemically modified through conjugation of the epsilon-amino group of the Lysine side chain with (2-[2-(2-Amino-ethoxy)-ethoxy]-acetyl)-(gamma-Glu)-CO-(CH2) 16-CO2H
  SITE 20: note = 2-Aminoisobutyric Acid
  SITE 29: note = D-amino acid
  SITE 41: note = Amidated residue
YXQGTFTSDXSKXLDKKAQXAFIEYLIEAGESSGAPPPSGS

SEQ ID NO: 290 - protein, 41 aa, synthetic construct
  SITE 2: note = 2-Aminoisobutyric Acid
  SITE 10: note = 3-(4-Pyridyl)-L-alanine
  SITE 13: note = alpha-methyl-leucine
  SITE 17: note = Lysine is chemically modified through conjugation of the epsilon-amino group of the Lysine side chain with (2-[2-(2-Amino-ethoxy)-ethoxy]-acetyl)-(gamma-Glu)-CO-(CH2) 16-CO2H
  SITE 20: note = 2-Aminoisobutyric Acid
  SITE 29: note = D-amino acid
  SITE 41: note = Amidated residue
YXQGTFTSDXSKXLDKKAQXAFIEYLIEAGESSGEPPPSGS

SEQ ID NO: 291 - protein, 41 aa, synthetic construct
  SITE 2: note = 2-Aminoisobutyric Acid
  SITE 10: note = 3-(4-Pyridyl)-L-alanine
  SITE 13: note = alpha-methyl-leucine
  SITE 17: note = Lysine is chemically modified through conjugation of the epsilon-amino group of the Lysine side chain with (2-[2-(2-Amino-ethoxy)-ethoxy]-acetyl)-(gamma-Glu)-CO-(CH2) 16-CO2H
  SITE 20: note = 2-Aminoisobutyric Acid
  SITE 29: note = 2-Aminoisobutyric Acid
  SITE 41: note = Amidated residue
YXQGTFTSDXSKXLDKKAQXAFIEYLIAXGESSGAPPPSGS

SEQ ID NO: 292 - protein, 41 aa, synthetic construct
  SITE 2: note = 2-Aminoisobutyric Acid
  SITE 10: note = 3-(4-Pyridyl)-L-alanine
  SITE 13: note = alpha-methyl-leucine
  SITE 17: note = Lysine is chemically modified through conjugation of the epsilon-amino group of the Lysine side chain with (2-[2-(2-Amino-ethoxy)-ethoxy]-acetyl)-(gamma-Glu)-CO-(CH2) 16-CO2H
  SITE 20: note = 2-Aminoisobutyric Acid
  SITE 29: note = 2-Aminoisobutyric Acid
  SITE 41: note = Amidated residue
YXQGTFTSDXSKXLDKKAQXAFIEYLIAXGESSGEPPPSGE

SEQ ID NO: 293 - protein, 41 aa, synthetic construct
  SITE 2: note = 2-Aminoisobutyric Acid
  SITE 10: note = 3-(4-Pyridyl)-L-alanine
  SITE 13: note = alpha-methyl-leucine
  SITE 17: note = Lysine is chemically modified through conjugation of the epsilon-amino group of the Lysine side chain with (2-[2-(2-Amino-ethoxy)-ethoxy]-acetyl)-(gamma-Glu)-CO-(CH2) 16-CO2H
  SITE 20: note = 2-Aminoisobutyric Acid
  SITE 29: note = 2-Aminoisobutyric Acid
  SITE 41: note = Amidated residue
YXQGTFTSDXSKXLDKKAQXAFIEYLIAXGESSGEPPPSGS

SEQ ID NO: 294 - protein, 41 aa, synthetic construct
  SITE 2: note = 2-Aminoisobutyric Acid
  SITE 13: note = alpha-methyl-leucine
  SITE 17: note = Lysine is chemically modified through conjugation of the epsilon-amino group of the Lysine side chain with (2-[2-(2-Amino-ethoxy)-ethoxy]-acetyl)-(gamma-Glu)-CO-(CH2) 18-CO2H
  SITE 20: note = 2-Aminoisobutyric Acid
  SITE 41: note = Amidated residue
YXQGTFTSDFSIXLDKKAQXAFIEYLLEGGPSSGEPPPSEG

SEQ ID NO: 295 - protein, 41 aa, synthetic construct
  SITE 2: note = 2-Aminoisobutyric Acid
  SITE 13: note = alpha-methyl-leucine
  SITE 17: note = Lysine is chemically modified through conjugation of the epsilon-amino group of the Lysine side chain with (2-[2-(2-Amino-ethoxy)-ethoxy]-acetyl)-(gamma-Glu)-CO-(CH2) 18-CO2H
  SITE 41: note = Amidated residue
YXQGTFTSDYSIXLDKKAQRAFIEYLLEGGPSSGEPPPSEG

SEQ ID NO: 296 - protein, 41 aa, synthetic construct
  SITE 2: note = 2-Aminoisobutyric Acid
  SITE 6: note = alpha-methyl-2-fluoro-L-phenylalanine
  SITE 17: note = Lysine is chemically modified through conjugation of the epsilon-amino group of the Lysine side chain with (2-[2-(2-Amino-ethoxy)-ethoxy]-acetyl)-(gamma-Glu)-CO-(CH2) 18-CO2H
  SITE 20: note = 2-Aminoisobutyric Acid
  SITE 41: note = Amidated residue
HXQGTXTSDYSILLDKKAAXAFIEYLIETGPSSGEPPPSEG

SEQ ID NO: 297 - protein, 41 aa, synthetic construct
  SITE 2: note = 2-Aminoisobutyric Acid
  SITE 6: note = alpha-methyl-2-fluoro-L-phenylalanine
  SITE 13: note = alpha-methyl-leucine
  SITE 17: note = Lysine is chemically modified through conjugation of the epsilon-amino group of the Lysine side chain with (2-[2-(2-Amino-ethoxy)-ethoxy]-acetyl)-(gamma-Glu)-CO-(CH2) 16-CO2H
  SITE 20: note = 2-Aminoisobutyric Acid
  SITE 41: note = Amidated residue
HXQGTXTSDYSIXLDKKAAXAFIEYLIETGPSSGEPPPSEG

SEQ ID NO: 298 - protein, 41 aa, synthetic construct
  SITE 2: note = 2-Aminoisobutyric Acid
  SITE 6: note = alpha-methyl-2-fluoro-L-phenylalanine
  SITE 13: note = alpha-methyl-leucine
  SITE 17: note = Lysine is chemically modified through conjugation of the epsilon-amino group of the Lysine side chain with (2-[2-(2-Amino-ethoxy)-ethoxy]-acetyl)-(gamma-Glu)-CO-(CH2) 16-CO2H
  SITE 20: note = 2-Aminoisobutyric Acid
  SITE 41: note = Amidated residue
YXQGTXTSDYSKXLDKKAQXQFIEYLEEGGPSSGEPPPSEG

SEQ ID NO: 299 - protein, 41 aa, synthetic construct
  SITE 2: note = 2-Aminoisobutyric Acid
  SITE 6: note = alpha-methyl-2-fluoro-L-phenylalanine
  SITE 20: note = Lysine is chemically modified through conjugation of the epsilon-amino group of the Lysine side chain with (2-[2-(2-Amino-ethoxy)-ethoxy]-acetyl)-(gamma-Glu)-CO-(CH2) 18-CO2H
  SITE 41: note = Amidated residue
YXQGTXTSDYSILLDKIAQKAFIEYLLEGGPSSGEPPPSEG

SEQ ID NO: 300 - protein, 41 aa, synthetic construct
  SITE 2: note = 2-Aminoisobutyric Acid
  SITE 13: note = alpha-methyl-leucine
  SITE 17: note = Lysine is chemically modified through conjugation of the epsilon-amino group of the Lysine side chain with (2-[2-(2-Amino-ethoxy)-ethoxy]-acetyl)2-(gamma-Glu)-CO-(CH2 )18-CO2H
  SITE 20: note = 2-Aminoisobutyric Acid
  SITE 41: note = Amidated residue
YXQGTFTSDYSIXLDKKAAXAFIEYLLEGGPSSGEPPPSEG

SEQ ID NO: 301 - protein, 41 aa, synthetic construct
  SITE 2: note = 2-Aminoisobutyric Acid
  SITE 6: note = alpha-methyl-2-fluoro-L-phenylalanine
  SITE 20: note = Lysine is chemically modified through conjugation of the epsilon-amino group of the Lysine side chain with (2-[2-(2-Amino-ethoxy)-ethoxy]-acetyl)-(gamma-Glu)-CO-(CH2) 18-CO2H
  SITE 41: note = Amidated residue
YXQGTXTSDYSKLLDKIAQKAFIEYLLEGGPSSGEPPPSEG

SEQ ID NO: 302 - protein, 41 aa, synthetic construct
  SITE 2: note = 2-Aminoisobutyric Acid
  SITE 6: note = alpha-methyl-2-fluoro-L-phenylalanine
  SITE 20: note = Lysine is chemically modified through conjugation of the epsilon-amino group of the Lysine side chain with (2-[2-(2-Amino-ethoxy)-ethoxy]-acetyl)-(gamma-Glu)-CO-(CH2) 18-CO2H
  SITE 41: note = Amidated residue
YXQGTXTSDYSILLDKIAAKAFIEYLIEGGPSSGEPPPSEG

SEQ ID NO: 303 - protein, 41 aa, synthetic construct
  SITE 1: note = N-methyl-tyrosine
  SITE 2: note = 2-Aminoisobutyric Acid
  SITE 6: note = alpha-methyl-L-phenylalanine
  SITE 20: note = Lysine is chemically modified through conjugation of the epsilon-amino group of the Lysine side chain with (2-[2-(2-Amino-ethoxy)-ethoxy]-acetyl)2-(gamma-Glu)-CO-(CH2 )18-CO2H
  SITE 41: note = Amidated residue
YXQGTXTSDYSSLLDKIAAKAFIEYLLEGGPSSGEPPPSEG

SEQ ID NO: 304 - protein, 41 aa, synthetic construct
  SITE 2: note = 2-Aminoisobutyric Acid
  SITE 6: note = alpha-methyl-2-fluoro-L-phenylalanine
  SITE 17: note = Lysine is chemically modified through conjugation of the epsilon-amino group of the Lysine side chain with (2-[2-(2-Amino-ethoxy)-ethoxy]-acetyl)-(gamma-Glu)-CO-(CH2) 18-CO2H
  SITE 20: note = 2-Aminoisobutyric Acid
  SITE 41: note = Amidated residue
HXQGTXTSDYSILLDKKAAXAFIEYLIEAGPSSGEPPPSEG

SEQ ID NO: 305 - protein, 41 aa, synthetic construct; identical to SEQ ID NO: 302
  SITE 1: note = N-methyl-tyrosine
  SITE 2: note = 2-Aminoisobutyric Acid
  SITE 6: note = alpha-methyl-L-phenylalanine
  SITE 20: note = Lysine is chemically modified through conjugation of the epsilon-amino group of the Lysine side chain with (2-[2-(2-Amino-ethoxy)-ethoxy]-acetyl)2-(gamma-Glu)-CO-(CH2 )18-CO2H
  SITE 41: note = Amidated residue

SEQ ID NO: 306 - protein, 41 aa, synthetic construct
  SITE 1: note = N-methyl-tyrosine
  SITE 2: note = 2-Aminoisobutyric Acid
  SITE 6: note = alpha-methyl-L-phenylalanine
  SITE 20: note = Lysine is chemically modified through conjugation of the epsilon-amino group of the Lysine side chain with (2-[2-(2-Amino-ethoxy)-ethoxy]-acetyl)2-(gamma-Glu)-CO-(CH2 )18-CO2H
  SITE 41: note = Amidated residue
YXQGTXTSDYSILLDKIAAKAFVQWLIAGGPSSGEPPPSEG

SEQ ID NO: 307 - protein, 41 aa, synthetic construct
  SITE 1: note = N-methyl-tyrosine
  SITE 2: note = 2-Aminoisobutyric Acid
  SITE 6: note = alpha-methyl-L-phenylalanine
  SITE 20: note = Lysine is chemically modified through conjugation of the epsilon-amino group of the Lysine side chain with (2-[2-(2-Amino-ethoxy)-ethoxy]-acetyl)2-(gamma-Glu)-CO-(CH2 )18-CO2H
  SITE 41: note = Amidated residue
YXQGTXTSDYSILLDKQAAKAFVQWLIAGGPSSGEPPPSEG

SEQ ID NO: 308 - protein, 41 aa, synthetic construct
  SITE 1: note = N-methyl-tyrosine
  SITE 2: note = 2-Aminoisobutyric Acid
  SITE 6: note = alpha-methyl-L-phenylalanine
  SITE 20: note = Lysine is chemically modified through conjugation of the epsilon-amino group of the Lysine side chain with (2-[2-(2-Amino-ethoxy)-ethoxy]-acetyl)2-(gamma-Glu)-CO-(CH2 )18-CO2H
  SITE 41: note = Amidated residue
YXQGTXTSDYSILLDKQAAKAFVQWLIEGGPSSGEPPPSEG

SEQ ID NO: 309 - protein, 41 aa, synthetic construct
  SITE 2: note = 2-Aminoisobutyric Acid
  SITE 6: note = alpha-methyl-2-fluoro-L-phenylalanine
  SITE 20: note = Lysine is chemically modified through conjugation of the epsilon-amino group of the Lysine side chain with (2-[2-(2-Amino-ethoxy)-ethoxy]-acetyl)-(gamma-Glu)-CO-(CH2) 18-CO2H
  SITE 41: note = Amidated residue
YXQGTXTSDYSKLLDEIAQKAFIEYLLEGGPSSGEPPPSEG

SEQ ID NO: 310 - protein, 41 aa, synthetic construct
  SITE 2: note = 2-Aminoisobutyric Acid
  SITE 6: note = alpha-methyl-2-fluoro-L-phenylalanine
  SITE 20: note = Lysine is chemically modified through conjugation of the epsilon-amino group of the Lysine side chain with (2-[2-(2-Amino-ethoxy)-ethoxy]-acetyl)-(gamma-Glu)-CO-(CH2) 18-CO2H
  SITE 41: note = Amidated residue
YXQGTXTSDYSKLLDKIAQKAFIEYLIEGGPSSGEPPPSEG

SEQ ID NO: 311 - protein, 41 aa, synthetic construct
  SITE 2: note = 2-Aminoisobutyric Acid
  SITE 13: note = alpha-methyl-leucine
  SITE 20: note = Lysine is chemically modified through conjugation of the epsilon-amino group of the Lysine side chain with (2-[2-(2-Amino-ethoxy)-ethoxy]-acetyl)2-(gamma-Glu)-CO-(CH2 )18-CO2H
  SITE 41: note = Amidated residue
YXQGTFTSDYSIXLDKQAAKAFVEWLLAGGPSSGEPPPSEG

SEQ ID NO: 312 - protein, 41 aa, synthetic construct
  SITE 2: note = 2-Aminoisobutyric Acid
  SITE 6: note = alpha-methyl-2-fluoro-L-phenylalanine
  SITE 20: note = Lysine is chemically modified through conjugation of the epsilon-amino group of the Lysine side chain with (2-[2-(2-Amino-ethoxy)-ethoxy]-acetyl)-(gamma-Glu)-CO-(CH2) 18-CO2H
  SITE 21: note = L-ornithine
  SITE 41: note = Amidated residue
YXQGTXTSDYSILLDKAAQKXFIEYLIEGGPSSGEPPPSEG

SEQ ID NO: 313 - protein, 41 aa, synthetic construct
  SITE 2: note = 2-Aminoisobutyric Acid
  SITE 6: note = alpha-methyl-L-phenylalanine
  SITE 20: note = Lysine is chemically modified through conjugation of the epsilon-amino group of the Lysine side chain with (2-[2-(2-Amino-ethoxy)-ethoxy]-acetyl)2-(gamma-Glu)-CO-(CH2 )16-CO2H
  SITE 41: note = Amidated residue
YXQGTXTSDYSILLDKIAAKNFIEYLVEGGPSSGEPPPSEG

SEQ ID NO: 314 - protein, 41 aa, synthetic construct
  SITE 2: note = 2-Aminoisobutyric Acid
  SITE 13: note = alpha-methyl-leucine
  SITE 20: note = Lysine is chemically modified through conjugation of the epsilon-amino group of the Lysine side chain with (2-[2-(2-Amino-ethoxy)-ethoxy]-acetyl)2-(gamma-Glu)-CO-(CH2 )18-CO2H
  SITE 21: note = L-ornithine
  SITE 41: note = Amidated residue
YXQGTFTSDYSIXLDKIAAKXFVQYLIAGGPSSGEPPPSEG

SEQ ID NO: 315 - protein, 41 aa, synthetic construct
  SITE 2: note = 2-Aminoisobutyric Acid
  SITE 6: note = alpha-methyl-2-fluoro-L-phenylalanine
  SITE 20: note = Lysine is chemically modified through conjugation of the epsilon-amino group of the Lysine side chain with (2-[2-(2-Amino-ethoxy)-ethoxy]-acetyl)-(gamma-Glu)-CO-(CH2) 18-CO2H
  SITE 41: note = Amidated residue
YXQGTXTSDYSKLLDKQAQKQFIEYLIEGGPSSGEPPPSEG

SEQ ID NO: 316 - protein, 41 aa, synthetic construct
  SITE 2: note = 2-Aminoisobutyric Acid
  SITE 6: note = alpha-methyl-2-fluoro-L-phenylalanine
  SITE 20: note = Lysine is chemically modified through conjugation of the epsilon-amino group of the Lysine side chain with (2-[2-(2-Amino-ethoxy)-ethoxy]-acetyl)-(gamma-Glu)-CO-(CH2) 18-CO2H
  SITE 21: note = L-ornithine
  SITE 41: note = Amidated residue
YXQGTXTSDYSKLLDKIAQKXFIEWLIEGGPSSGEPPPSEG

SEQ ID NO: 317 - protein, 41 aa, synthetic construct
  SITE 2: note = 2-Aminoisobutyric Acid
  SITE 6: note = alpha-methyl-2-fluoro-L-phenylalanine
  SITE 20: note = Lysine is chemically modified through conjugation of the epsilon-amino group of the Lysine side chain with (2-[2-(2-Amino-ethoxy)-ethoxy]-acetyl)-(gamma-Glu)-CO-(CH2) 18-CO2H
  SITE 41: note = Amidated residue
YXQGTXTSDYSKILDKIAQKAFIEYLLEGGPSSGEPPPSEG

SEQ ID NO: 318 - protein, 41 aa, synthetic construct
  SITE 2: note = 2-Aminoisobutyric Acid
  SITE 13: note = alpha-methyl-leucine
  SITE 20: note = Lysine is chemically modified through conjugation of the epsilon-amino group of the Lysine side chain with (2-[2-(2-Amino-ethoxy)-ethoxy]-acetyl)2-(gamma-Glu)-CO-(CH2 )18-CO2H
  SITE 41: note = Amidated residue
YXQGTFTSDYSIXLDKIAAKQFVEYLIAGGPSSGEPPPSEG

SEQ ID NO: 319 - protein, 40 aa, synthetic construct
  SITE 2: note = 2-Aminoisobutyric Acid
  SITE 13: note = alpha-methyl-leucine
  SITE 17: note = Lysine is chemically modified through conjugation of the epsilon-amino group of the Lysine side chain with (2-[2-(2-Amino-ethoxy)-ethoxy]-acetyl)-(gamma-Glu)-CO-(CH2) 18-CO2H
  SITE 40: note = Amidated residue
YXQGTFTSDYSIXLDKKAQRAFIEYLLEGGPSSGEPPPSG

SEQ ID NO: 320 - protein, 41 aa, synthetic construct
  SITE 2: note = 2-Aminoisobutyric Acid
  SITE 13: note = alpha-methyl-leucine
  SITE 17: note = Lysine is chemically modified through conjugation of the epsilon-amino group of the Lysine side chain with (2-[2-(2-Amino-ethoxy)-ethoxy]-acetyl)-(gamma-Glu)-CO-(CH2) 18-CO2H
  SITE 41: note = Amidated residue
YXQGTFTSDYSKXLDKKAQQAFIQWLIEGGPSSGEPPPSEG

SEQ ID NO: 321 - protein, 41 aa, synthetic construct
  SITE 2: note = 2-Aminoisobutyric Acid
  SITE 13: note = alpha-methyl-leucine
  SITE 17: note = Lysine is chemically modified through conjugation of the epsilon-amino group of the Lysine side chain with (2-[2-(2-Amino-ethoxy)-ethoxy]-acetyl)-(gamma-Glu)-CO-(CH2) 18-CO2H
  SITE 41: note = Amidated residue
YXQGTFTSDYSKXLDKKAQQAFVQWLIEGGPSSGEPPPSEG

SEQ ID NO: 322 - protein, 41 aa, synthetic construct
  SITE 2: note = 2-Aminoisobutyric Acid
  SITE 17: note = Lysine is chemically modified through conjugation of the epsilon-amino group of the Lysine side chain with (2-[2-(2-Amino-ethoxy)-ethoxy]-acetyl)-(gamma-Glu)-CO-(CH2) 18-CO2H
  SITE 20: note = 2-Aminoisobutyric Acid
  SITE 41: note = Amidated residue
YXQGTFTSDYSKLLDKKAQXAFVQWLIEGGPSSGEPPPSEG

SEQ ID NO: 323 - protein, 41 aa, synthetic construct
  SITE 2: note = 2-Aminoisobutyric Acid
  SITE 13: note = alpha-methyl-leucine
  SITE 20: note = Lysine is chemically modified through conjugation of the epsilon-amino group of the Lysine side chain with (2-[2-(2-Amino-ethoxy)-ethoxy]-acetyl)2-(gamma-Glu)-CO-(CH2 )18-CO2H
  SITE 29: note = 2-Aminoisobutyric Acid
  SITE 41: note = Amidated residue
YXQGTFTSDYSIXLDKQAAKAFVEWLLAXGPSSGEPPPSEG

SEQ ID NO: 324 - protein, 41 aa, synthetic construct
  SITE 2: note = 2-Aminoisobutyric Acid
  SITE 13: note = alpha-methyl-leucine
  SITE 20: note = Lysine is chemically modified through conjugation of the epsilon-amino group of the Lysine side chain with (2-[2-(2-Amino-ethoxy)-ethoxy]-acetyl)2-(gamma-Glu)-CO-(CH2 )18-CO2H
  SITE 41: note = Amidated residue
YXQGTFTSDYSIXLDKQAAKQFIEWLIEGGPSSGEPPPGEG

SEQ ID NO: 325 - protein, 41 aa, synthetic construct
  SITE 2: note = 2-Aminoisobutyric Acid
  SITE 13: note = alpha-methyl-leucine
  SITE 20: note = Lysine is chemically modified through conjugation of the epsilon-amino group of the Lysine side chain with (2-[2-(2-Amino-ethoxy)-ethoxy]-acetyl)2-(gamma-Glu)-CO-(CH2 )18-CO2H
  SITE 41: note = Amidated residue
YXQGTFTSDYSIXLDKQAAKQFIEWLIEGGPSSGEPPPGAE

SEQ ID NO: 326 - protein, 41 aa, synthetic construct
  SITE 2: note = 2-Aminoisobutyric Acid
  SITE 13: note = alpha-methyl-leucine
  SITE 20: note = Lysine is chemically modified through conjugation of the epsilon-amino group of the Lysine side chain with (2-[2-(2-Amino-ethoxy)-ethoxy]-acetyl)2-(gamma-Glu)-CO-(CH2 )18-CO2H
  SITE 41: note = Amidated residue
YXQGTFTSDYSIXLDKQAAKQFVEWLLAGGPSSGEPPPGEG

SEQ ID NO: 327 - protein, 41 aa, synthetic construct
  SITE 2: note = 2-Aminoisobutyric Acid
  SITE 6: note = alpha-methyl-2-fluoro-L-phenylalanine
  SITE 10: note = 4-cyano-L-phenylalanine
  SITE 20: note = Lysine is chemically modified through conjugation of the epsilon-amino group of the Lysine side chain with (2-[2-(2-Amino-ethoxy)-ethoxy]-acetyl)2-(gamma-Glu)-CO-(CH2 )18-CO2H
  SITE 41: note = Amidated residue
YXQGTXTSDXSILLDKQAQKAFIEYLLEGGPSSGEPPPSEG

SEQ ID NO: 328 - protein, 41 aa, synthetic construct
  SITE 2: note = 2-Aminoisobutyric Acid
  SITE 13: note = alpha-methyl-leucine
  SITE 17: note = Lysine is chemically modified through conjugation of the epsilon-amino group of the Lysine side chain with (2-[2-(2-Amino-ethoxy)-ethoxy]-acetyl)-(gamma-Glu)-CO-(CH2) 18-CO2H
  SITE 41: note = Amidated residue
YXQGTFTSDYSKXLDKKAQQAFIEYLIAGGPSSGAPPPSSE

SEQ ID NO: 329 - protein, 41 aa, synthetic construct
  SITE 2: note = 2-Aminoisobutyric Acid
  SITE 13: note = alpha-methyl-leucine
  SITE 20: note = Lysine is chemically modified through conjugation of the epsilon-amino group of the Lysine side chain with (2-[2-(2-Amino-ethoxy)-ethoxy]-acetyl)2-(gamma-Glu)-CO-(CH2 )18-CO2H
  SITE 29: note = 2-Aminoisobutyric Acid
  SITE 41: note = Amidated residue
YXQGTFTSDYSIXLDKIAAKQFVQWLIEXGPSSGEPPPSEG

SEQ ID NO: 330 - protein, 41 aa, synthetic construct
  SITE 2: note = 2-Aminoisobutyric Acid
  SITE 13: note = alpha-methyl-leucine
  SITE 20: note = Lysine is chemically modified through conjugation of the epsilon-amino group of the Lysine side chain with (2-[2-(2-Amino-ethoxy)-ethoxy]-acetyl)2-(gamma-Glu)-CO-(CH2 )18-CO2H
  SITE 29: note = 2-Aminoisobutyric Acid
  SITE 41: note = Amidated residue
YXQGTFTSDYSIXLDKIAAKQFVEWLLAXGPSSGEPPPSEG

SEQ ID NO: 331 - protein, 41 aa, synthetic construct
  SITE 2: note = 2-Aminoisobutyric Acid
  SITE 13: note = alpha-methyl-leucine
  SITE 20: note = Lysine is chemically modified through conjugation of the epsilon-amino group of the Lysine side chain with (2-[2-(2-Amino-ethoxy)-ethoxy]-acetyl)2-(gamma-Glu)-CO-(CH2 )18-CO2H
  SITE 29: note = 2-Aminoisobutyric Acid
  SITE 41: note = Amidated residue
YXQGTFTSDYSIXLDKQAAKQFVNWLLAXGPSSGEPPPSEG

SEQ ID NO: 332 - protein, 41 aa, synthetic construct
  SITE 2: note = 2-Aminoisobutyric Acid
  SITE 13: note = alpha-methyl-leucine
  SITE 20: note = Lysine is chemically modified through conjugation of the epsilon-amino group of the Lysine side chain with (2-[2-(2-Amino-ethoxy)-ethoxy]-acetyl)2-(gamma-Glu)-CO-(CH2 )18-CO2H
  SITE 29: note = 2-Aminoisobutyric Acid
  SITE 41: note = Amidated residue
YXQGTFTSDYSIXLDKQAAKQFVEWLIAXGPSSGEPPPSEG

SEQ ID NO: 333 - protein, 41 aa, synthetic construct
  SITE 2: note = 2-Aminoisobutyric Acid
  SITE 13: note = alpha-methyl-leucine
  SITE 20: note = Lysine is chemically modified through conjugation of the epsilon-amino group of the Lysine side chain with (2-[2-(2-Amino-ethoxy)-ethoxy]-acetyl)2-(gamma-Glu)-CO-(CH2 )18-CO2H
  SITE 29: note = 2-Aminoisobutyric Acid
  SITE 41: note = Amidated residue
YXQGTFTSDYSIXLDKQAAKQFVEWLLAXGPSSGAPPPSEG

SEQ ID NO: 334 - protein, 41 aa, synthetic construct
  SITE 2: note = 2-Aminoisobutyric Acid
  SITE 13: note = alpha-methyl-leucine
  SITE 16: note = L-ornithine
  SITE 20: note = Lysine is chemically modified through conjugation of the epsilon-amino group of the Lysine side chain with (2-[2-(2-Amino-ethoxy)-ethoxy]-acetyl)2-(gamma-Glu)-CO-(CH2 )18-CO2H
  SITE 29: note = 2-Aminoisobutyric Acid
  SITE 41: note = Amidated residue
YXQGTFTSDYSIXLDXQAAKQFVEWLLAXGPSSGEPPPSEG

SEQ ID NO: 335 - protein, 41 aa, synthetic construct
  SITE 2: note = 2-Aminoisobutyric Acid
  SITE 13: note = alpha-methyl-leucine
  SITE 20: note = Lysine is chemically modified through conjugation of the epsilon-amino group of the Lysine side chain with (epsilon-K)2-(gamma-Glu)-CO-(CH2)18-CO2H
  SITE 29: note = 2-Aminoisobutyric Acid
YXQGTFTSDYSIXLDKQAAKQFVEWLLAXGPSSGEPPPSEG

SEQ ID NO: 336 - protein, 41 aa, synthetic construct; identical to SEQ ID NO: 310
  SITE 2: note = 2-Aminoisobutyric Acid
  SITE 6: note = alpha-methyl-2-fluoro-L-phenylalanine
  SITE 20: note = Lysine is chemically modified through conjugation of the epsilon-amino group of the Lysine side chain with (2-[2-(2-Amino-ethoxy)-ethoxy]-acetyl)-(gamma-Glu)-CO-(CH2) 16-CO2H
  SITE 41: note = Amidated residue

SEQ ID NO: 337 - protein, 41 aa, synthetic construct
  SITE 2: note = 2-Aminoisobutyric Acid
  SITE 6: note = alpha-methyl-2-fluoro-L-phenylalanine
  SITE 20: note = Lysine is chemically modified through conjugation of the epsilon-amino group of the Lysine side chain with (2-[2-(2-Amino-ethoxy)-ethoxy]-acetyl)-(gamma-Glu)-CO-(CH2) 16-CO2H
  SITE 41: note = Amidated residue
YXQGTXTSDYSILLDKQAAKAFIEYLIEGGPSSGEPPPSEG

SEQ ID NO: 338 - protein, 41 aa, synthetic construct
  SITE 2: note = 2-Aminoisobutyric Acid
  SITE 13: note = alpha-methyl-leucine
  SITE 20: note = Lysine is chemically modified through conjugation of the epsilon-amino group of the Lysine side chain with (2-[2-(2-Amino-ethoxy)-ethoxy]-acetyl)2-(gamma-Glu)-CO-(CH2 )18-CO2H
  SITE 41: note = Amidated residue
YXQGTFTSDYSIXLDKQAAKQFVEWLIAGGPSSGEPPPAEG

SEQ ID NO: 339 - protein, 41 aa, synthetic construct
  SITE 2: note = 2-Aminoisobutyric Acid
  SITE 13: note = alpha-methyl-leucine
  SITE 20: note = Lysine is chemically modified through conjugation of the epsilon-amino group of the Lysine side chain with (2-[2-(2-Amino-ethoxy)-ethoxy]-acetyl)2-(gamma-Glu)-CO-(CH2 )18-CO2H
  SITE 29: note = 2-Aminoisobutyric Acid
  SITE 41: note = Amidated residue
YXQGTFTSDYSIXLDKQAAKQFVEWLIAXGPSSGEPPPGEG

SEQ ID NO: 340 - protein, 41 aa, synthetic construct
  SITE 2: note = 2-Aminoisobutyric Acid
  SITE 13: note = alpha-methyl-leucine
  SITE 20: note = Lysine is chemically modified through conjugation of the epsilon-amino group of the Lysine side chain with (2-[2-(2-Amino-ethoxy)-ethoxy]-acetyl)2-(gamma-Glu)-CO-(CH2 )18-CO2H
  SITE 29: note = 2-Aminoisobutyric Acid
  SITE 41: note = Amidated residue
YXQGTFTSDYSIXLDKQAAKQFVEWLIAXGPSSGEPPPAEG

SEQ ID NO: 341 - protein, 41 aa, synthetic construct
  SITE 2: note = 2-Aminoisobutyric Acid
  SITE 13: note = alpha-methyl-leucine
  SITE 20: note = Lysine is chemically modified through conjugation of the epsilon-amino group of the Lysine side chain with (2-[2-(2-Amino-ethoxy)-ethoxy]-acetyl)2-(gamma-Glu)-CO-(CH2 )18-CO2H
  SITE 29: note = 2-Aminoisobutyric Acid
  SITE 41: note = Amidated residue
YXQGTFTSDYSIXLDKQAAKQFVEWLIAXGPSSGEPPPGSG

SEQ ID NO: 342 - protein, 41 aa, synthetic construct
  SITE 2: note = 2-Aminoisobutyric Acid
  SITE 13: note = alpha-methyl-leucine
  SITE 20: note = Lysine is chemically modified through conjugation of the epsilon-amino group of the Lysine side chain with (2-[2-(2-Amino-ethoxy)-ethoxy]-acetyl)2-(gamma-Glu)-CO-(CH2 )18-CO2H
  SITE 29: note = 2-Aminoisobutyric Acid
  SITE 41: note = Amidated residue
YXQGTFTSDYSIXLDKQAAKQFVEWLIAXGPSSGEPPPGTG

SEQ ID NO: 343 - protein, 41 aa, synthetic construct
  SITE 2: note = 2-Aminoisobutyric Acid
  SITE 13: note = alpha-methyl-leucine
  SITE 17: note = Lysine is chemically modified through conjugation of the epsilon-amino group of the Lysine side chain with (2-[2-(2-Amino-ethoxy)-ethoxy]-acetyl)-(gamma-Glu)-CO-(CH2) 18-CO2H
  SITE 41: note = Amidated residue
YXQGTFTSDYSKXLDKKAQQAFIEYLIAGGPSSGEPPPSGD

SEQ ID NO: 344 - protein, 41 aa, synthetic construct
  SITE 2: note = 2-Aminoisobutyric Acid
  SITE 6: note = alpha-methyl-2-fluoro-L-phenylalanine
  SITE 20: note = Lysine is chemically modified through conjugation of the epsilon-amino group of the Lysine side chain with (2-[2-(2-Amino-ethoxy)-ethoxy]-acetyl)-(gamma-Glu)-CO-(CH2) 18-CO2H
  SITE 41: note = Amidated residue
YXQGTXTSDYSKLLDKIAQKAFIQYLIEGGPSSGEPPPSEG

SEQ ID NO: 345 - protein, 41 aa, synthetic construct
  SITE 2: note = 2-Aminoisobutyric Acid
  SITE 6: note = alpha-methyl-2-fluoro-L-phenylalanine
  SITE 20: note = Lysine is chemically modified through conjugation of the epsilon-amino group of the Lysine side chain with (2-[2-(2-Amino-ethoxy)-ethoxy]-acetyl)-(gamma-Glu)-CO-(CH2) 18-CO2H
  SITE 41: note = Amidated residue
YXQGTXTSDYSKLLDKIAQKAFIEYLIEGGPSSGAPPPSEG

SEQ ID NO: 346 - protein, 41 aa, synthetic construct
  SITE 2: note = 2-Aminoisobutyric Acid
  SITE 6: note = alpha-methyl-2-fluoro-L-phenylalanine
  SITE 20: note = Lysine is chemically modified through conjugation of the epsilon-amino group of the Lysine side chain with (2-[2-(2-Amino-ethoxy)-ethoxy]-acetyl)-(gamma-Glu)-CO-(CH2) 18-CO2H
  SITE 41: note = Amidated residue
YXQGTXTSDYSILLDKQAAKEFIEYLIEGGPSSGAPPPSEG

SEQ ID NO: 347 - protein, 41 aa, synthetic construct
  SITE 2: note = 2-Aminoisobutyric Acid
  SITE 6: note = alpha-methyl-2-fluoro-L-phenylalanine
  SITE 10: note = 4-cyano-L-phenylalanine
  SITE 20: note = Lysine is chemically modified through conjugation of the epsilon-amino group of the Lysine side chain with (2-[2-(2-Amino-ethoxy)-ethoxy]-acetyl)-(gamma-Glu)-CO-(CH2) 18-CO2H
  SITE 41: note = Amidated residue
YXQGTXTSDXSILLDKQAQKAFIQYLLEGGPSSGEPPPSEG

SEQ ID NO: 348 - protein, 41 aa, synthetic construct
  SITE 2: note = 2-Aminoisobutyric Acid
  SITE 13: note = alpha-methyl-leucine
  SITE 17: note = Lysine is chemically modified through conjugation of the epsilon-amino group of the Lysine side chain with (2-[2-(2-Amino-ethoxy)-ethoxy]-acetyl)-(gamma-Glu)-CO-(CH2) 18-CO2H
  SITE 29: note = D-amino acid
  SITE 41: note = Amidated residue
YXQGTFTSDYSKXLDKKAQQAFVQWLIEAGPSSGEPPPSEG

SEQ ID NO: 349 - protein, 41 aa, synthetic construct
  SITE 2: note = 2-Aminoisobutyric Acid
  SITE 13: note = alpha-methyl-leucine
  SITE 17: note = Lysine is chemically modified through conjugation of the epsilon-amino group of the Lysine side chain with (2-[2-(2-Amino-ethoxy)-ethoxy]-acetyl)-(gamma-Glu)-CO-(CH2) 18-CO2H
  SITE 20: note = 2-Aminoisobutyric Acid
  SITE 41: note = Amidated residue
YXQGTFTSDYSKXLDKKAQXAFVQWLLEGGPSSGEPPPSEG

SEQ ID NO: 350 - protein, 41 aa, synthetic construct
  SITE 2: note = 2-Aminoisobutyric Acid
  SITE 13: note = alpha-methyl-leucine
  SITE 17: note = Lysine is chemically modified through conjugation of the epsilon-amino group of the Lysine side chain with (2-[2-(2-Amino-ethoxy)-ethoxy]-acetyl)-(gamma-Glu)-CO-(CH2) 18-CO2H
  SITE 41: note = Amidated residue
YXQGTFTSDYSKXLDKKAQQAFIEYLLAGGPSSGEPPPSGE

SEQ ID NO: 351 - protein, 41 aa, synthetic construct
  SITE 2: note = 2-Aminoisobutyric Acid
  SITE 6: note = alpha-methyl-2-fluoro-L-phenylalanine
  SITE 20: note = Lysine is chemically modified through conjugation of the epsilon-amino group of the Lysine side chain with (2-[2-(2-Amino-ethoxy)-ethoxy]-acetyl)2-(gamma-Glu)-CO-(CH2 )18-CO2H
  SITE 41: note = Amidated residue
YXQGTXTSDYSILLDKQAQKAFIEYLLEGGPSSGEPPPSEG

SEQ ID NO: 352 - protein, 41 aa, synthetic construct
  SITE 2: note = 2-Aminoisobutyric Acid
  SITE 6: note = alpha-methyl-2-fluoro-L-phenylalanine
  SITE 20: note = Lysine is chemically modified through conjugation of the epsilon-amino group of the Lysine side chain with (2-[2-(2-Amino-ethoxy)-ethoxy]-acetyl)2-(gamma-Glu)-CO-(CH2 )18-CO2H
  SITE 41: note = Amidated residue
YXQGTXTSDFSILLDKQAQKAFIEYLLEGGPSSGEPPPSEG

SEQ ID NO: 353 - protein, 41 aa, synthetic construct; identical to SEQ ID NO: 327
  SITE 2: note = 2-Aminoisobutyric Acid
  SITE 6: note = alpha-methyl-2-fluoro-L-phenylalanine
  SITE 10: note = 3-(4-Pyridyl)-L-alanine
  SITE 20: note = Lysine is chemically modified through conjugation of the epsilon-amino group of the Lysine side chain with (2-[2-(2-Amino-ethoxy)-ethoxy]-acetyl)2-(gamma-Glu)-CO-(CH2 )18-CO2H
  SITE 41: note = Amidated residue

SEQ ID NO: 354 - protein, 41 aa, synthetic construct
  SITE 2: note = 2-Aminoisobutyric Acid
  SITE 6: note = alpha-methyl-2-fluoro-L-phenylalanine
  SITE 20: note = Lysine is chemically modified through conjugation of the epsilon-amino group of the Lysine side chain with (2-[2-(2-Amino-ethoxy)-ethoxy]-acetyl)2-(gamma-Glu)-CO-(CH2 )18-CO2H
  SITE 41: note = Amidated residue
YXQGTXTSDYSILLDKQAAKEFIEYLIEGGPSSGEPPPSEG

SEQ ID NO: 355 - protein, 41 aa, synthetic construct
  SITE 2: note = 2-Aminoisobutyric Acid
  SITE 13: note = alpha-methyl-leucine
  SITE 20: note = Lysine is chemically modified through conjugation of the epsilon-amino group of the Lysine side chain with (2-[2-(2-Amino-ethoxy)-ethoxy]-acetyl)2-(gamma-Glu)-CO-(CH2 )18-CO2H
  SITE 29: note = 2-Aminoisobutyric Acid
  SITE 41: note = Amidated residue
YXQGTFTSDYSIXLDKQAAKQFIEYLIAXGPSSGEPPPSEG

SEQ ID NO: 356 - protein, 41 aa, synthetic construct
  SITE 2: note = 2-Aminoisobutyric Acid
  SITE 6: note = alpha-methyl-2-fluoro-L-phenylalanine
  SITE 10: note = 4-cyano-L-phenylalanine
  SITE 20: note = Lysine is chemically modified through conjugation of the epsilon-amino group of the Lysine side chain with (2-[2-(2-Amino-ethoxy)-ethoxy]-acetyl)2-(gamma-Glu)-CO-(CH2 )18-CO2H
  SITE 41: note = Amidated residue
YXQGTXTSDXSILLDKQAQKAFIEYLLEGGPSSGEPPPSAG

SEQ ID NO: 357 - protein, 41 aa, synthetic construct
  SITE 2: note = 2-Aminoisobutyric Acid
  SITE 6: note = alpha-methyl-2-fluoro-L-phenylalanine
  SITE 20: note = Lysine is chemically modified through conjugation of the epsilon-amino group of the Lysine side chain with (2-[2-(2-Amino-ethoxy)-ethoxy]-acetyl)-(gamma-Glu)-CO-(CH2) 18-CO2H
  SITE 41: note = Amidated residue
YXQGTXTSDYSILLDAQAAKEFIEYLIEGGPSSGEPPPSEG

SEQ ID NO: 358 - protein, 41 aa, synthetic construct; identical to SEQ ID NO: 327
  SITE 2: note = 2-Aminoisobutyric Acid
  SITE 6: note = alpha-methyl-2-fluoro-L-phenylalanine
  SITE 10: note = 4-cyano-L-phenylalanine
  SITE 20: note = Lysine is chemically modified through conjugation of the epsilon-amino group of the Lysine side chain with (2-[2-(2-Amino-ethoxy)-ethoxy]-acetyl)-(gamma-Glu)2-CO-(CH2 )18-CO2H
  SITE 41: note = Amidated residue

SEQ ID NO: 359 - protein, 41 aa, synthetic construct; identical to SEQ ID NO: 347
  SITE 2: note = 2-Aminoisobutyric Acid
  SITE 6: note = alpha-methyl-2-fluoro-L-phenylalanine
  SITE 10: note = 4-cyano-L-phenylalanine
  SITE 20: note = Lysine is chemically modified through conjugation of the epsilon-amino group of the Lysine side chain with (2-[2-(2-Amino-ethoxy)-ethoxy]-acetyl)2-(gamma-Glu)-CO-(CH2 )18-CO2H
  SITE 41: note = Amidated residue

SEQ ID NO: 360 - protein, 41 aa, synthetic construct
  SITE 2: note = 2-Aminoisobutyric Acid
  SITE 6: note = alpha-methyl-2-fluoro-L-phenylalanine
  SITE 20: note = Lysine is chemically modified through conjugation of the epsilon-amino group of the Lysine side chain with (2-[2-(2-Amino-ethoxy)-ethoxy]-acetyl)-(gamma-Glu)-CO-(CH2) 18-CO2H
  SITE 41: note = Amidated residue
YXQGTXTSDYSKILDKIAQKAFIQYLIEGGPSSGEPPPSEG

SEQ ID NO: 361 - protein, 41 aa, synthetic construct
  SITE 2: note = 2-Aminoisobutyric Acid
  SITE 6: note = alpha-methyl-2-fluoro-L-phenylalanine
  SITE 20: note = Lysine is chemically modified through conjugation of the epsilon-amino group of the Lysine side chain with (2-[2-(2-Amino-ethoxy)-ethoxy]-acetyl)-(gamma-Glu)-CO-(CH2) 18-CO2H
  SITE 41: note = Amidated residue
YXQGTXTSDYSKILDKIAQKAFIEYLIEGGPSSGAPPPSEG

SEQ ID NO: 362 - protein, 41 aa, synthetic construct
  SITE 2: note = 2-Aminoisobutyric Acid
  SITE 6: note = alpha-methyl-2-fluoro-L-phenylalanine
  SITE 20: note = Lysine is chemically modified through conjugation of the epsilon-amino group of the Lysine side chain with (2-[2-(2-Amino-ethoxy)-ethoxy]-acetyl)-(gamma-Glu)-CO-(CH2) 18-CO2H
  SITE 41: note = Amidated residue
YXQGTXTSDYSKLLDKIAQKAFIEYLIEGGPSSGAPPPSGE

SEQ ID NO: 363 - protein, 41 aa, synthetic construct
  SITE 2: note = 2-Aminoisobutyric Acid
  SITE 6: note = alpha-methyl-2-fluoro-L-phenylalanine
  SITE 20: note = Lysine is chemically modified through conjugation of the epsilon-amino group of the Lysine side chain with (2-[2-(2-Amino-ethoxy)-ethoxy]-acetyl)-(gamma-Glu)-CO-(CH2) 18-CO2H
  SITE 41: note = Amidated residue
YXQGTXTSDYSKLLDKIAQKAFIEYLIEGGPSSGAPPPEGE

SEQ ID NO: 364 - protein, 41 aa, synthetic construct
  SITE 2: note = 2-Aminoisobutyric Acid
  SITE 13: note = alpha-methyl-leucine
  SITE 17: note = Lysine is chemically modified through conjugation of the epsilon-amino group of the Lysine side chain with (2-[2-(2-Amino-ethoxy)-ethoxy]-acetyl)-(gamma-Glu)-CO-(CH2) 16-CO2H
  SITE 20: note = 2-Aminoisobutyric Acid
  SITE 41: note = Amidated residue
YXQGTFTSDYSKXLDKKAQXAFIEYLLEGGESSGAPPPSGS

SEQ ID NO: 365 - protein, 41 aa, synthetic construct
  SITE 2: note = 2-Aminoisobutyric Acid
  SITE 12: note = L-ornithine
  SITE 13: note = alpha-methyl-leucine
  SITE 17: note = Lysine is chemically modified through conjugation of the epsilon-amino group of the Lysine side chain with (2-[2-(2-Amino-ethoxy)-ethoxy]-acetyl)-(gamma-Glu)-CO-(CH2) 16-CO2H
  SITE 20: note = 2-Aminoisobutyric Acid
  SITE 41: note = Amidated residue
YXQGTFTSDYSXXLDKKAQXAFIEYLLEGGESSGAPPPSGS

SEQ ID NO: 366 - protein, 41 aa, synthetic construct; identical to SEQ ID NO: 365
  SITE 2: note = 2-Aminoisobutyric Acid
  SITE 12: note = (S)-2,3-diaminopropanoic acid
  SITE 13: note = alpha-methyl-leucine
  SITE 17: note = Lysine is chemically modified through conjugation of the epsilon-amino group of the Lysine side chain with (2-[2-(2-Amino-ethoxy)-ethoxy]-acetyl)-(gamma-Glu)-CO-(CH2) 16-CO2H
  SITE 20: note = 2-Aminoisobutyric Acid
  SITE 41: note = Amidated residue

SEQ ID NO: 367 - protein, 41 aa, synthetic construct
  SITE 2: note = 2-Aminoisobutyric Acid
  SITE 13: note = alpha-methyl-leucine
  SITE 17: note = Lysine is chemically modified through conjugation of the epsilon-amino group of the Lysine side chain with (2-[2-(2-Amino-ethoxy)-ethoxy]-acetyl)-(gamma-Glu)-CO-(CH2) 16-CO2H
  SITE 20: note = 2-Aminoisobutyric Acid
  SITE 41: note = Amidated residue
YXQGTFTSDYSRXLDKKAQXAFIEYLLEGGESSGAPPPSGS

SEQ ID NO: 368 - protein, 41 aa, synthetic construct
  SITE 2: note = 2-Aminoisobutyric Acid
  SITE 13: note = alpha-methyl-leucine
  SITE 17: note = Lysine is chemically modified through conjugation of the epsilon-amino group of the Lysine side chain with (2-[2-(2-Amino-ethoxy)-ethoxy]-acetyl)-(gamma-Glu)-CO-(CH2) 16-CO2H
  SITE 20: note = 2-Aminoisobutyric Acid
  SITE 41: note = Amidated residue
YXQGTFTSDYSQXLDKKAQXAFIEYLLEGGESSGAPPPSGS

SEQ ID NO: 369 - protein, 41 aa, synthetic construct
  SITE 2: note = 2-Aminoisobutyric Acid
  SITE 6: note = alpha-methyl-2-fluoro-L-phenylalanine
  SITE 10: note = 4-cyano-L-phenylalanine
  SITE 20: note = Lysine is chemically modified through conjugation of the epsilon-amino group of the Lysine side chain with (2-[2-(2-Amino-ethoxy)-ethoxy]-acetyl)-(gamma-Glu)-CO-(CH2) 18-CO2H
  SITE 41: note = Amidated residue
YXQGTXTSDXSKLLDKIAQKAFIEYLIEGGPSSGAPPPSGS

SEQ ID NO: 370 - protein, 41 aa, synthetic construct
  SITE 2: note = 2-Aminoisobutyric Acid
  SITE 6: note = alpha-methyl-2-fluoro-L-phenylalanine
  SITE 10: note = 4-cyano-L-phenylalanine
  SITE 20: note = Lysine is chemically modified through conjugation of the epsilon-amino group of the Lysine side chain with (2-[2-(2-Amino-ethoxy)-ethoxy]-acetyl)-(gamma-Glu)-CO-(CH2) 18-CO2H
  SITE 41: note = Amidated residue
YXQGTXTSDXSKLLDKIAQKAFIEYLIEGGPSSGEPPPSGS

SEQ ID NO: 371 - protein, 39 aa, synthetic construct
  SITE 2: note = 2-Aminoisobutyric Acid
  SITE 6: note = alpha-methyl-2-fluoro-L-phenylalanine
  SITE 10: note = 3-(4-Pyridyl)-L-alanine
  SITE 13: note = alpha-methyl-leucine
  SITE 16: note = L-ornithine
  SITE 17: note = Lysine is chemically modified through conjugation of the epsilon-amino group of the Lysine side chain with (2-[2-(2-Amino-ethoxy)-ethoxy]-acetyl)-(gamma-Glu)-CO-(CH2) 18-CO2H
  SITE 20: note = 2-Aminoisobutyric Acid
  SITE 21: note = L-ornithine
  SITE 24: note = D-amino acid
  SITE 25: note = alpha-methyl-L-tyrosine
YXQGTXTSDXSIXLDXKAQXXFIEXLLEGGPSSGEPPPS

SEQ ID NO: 372 - protein, 39 aa, synthetic construct; identical to SEQ ID NO: 371
  SITE 2: note = 2-Aminoisobutyric Acid
  SITE 6: note = alpha-methyl-2-fluoro-L-phenylalanine
  SITE 10: note = 3-(4-Pyridyl)-L-alanine
  SITE 13: note = alpha-methyl-leucine
  SITE 16: note = L-ornithine
  SITE 17: note = Lysine is chemically modified through conjugation of the epsilon-amino group of the Lysine side chain with (2-[2-(2-Amino-ethoxy)-ethoxy]-acetyl)-(gamma-Glu)-CO-(CH2) 18-CO2H
  SITE 20: note = 2-Aminoisobutyric Acid
  SITE 21: note = 2-Aminoisobutyric Acid
  SITE 24: note = D-amino acid
  SITE 25: note = alpha-methyl-L-tyrosine

SEQ ID NO: 373 - protein, 39 aa, synthetic construct; identical to SEQ ID NO: 371
  SITE 2: note = 2-Aminoisobutyric Acid
  SITE 6: note = alpha-methyl-2-fluoro-L-phenylalanine
  SITE 10: note = 3-(4-Pyridyl)-L-alanine
  SITE 13: note = alpha-methyl-leucine
  SITE 16: note = L-ornithine
  SITE 17: note = Lysine is chemically modified through conjugation of the epsilon-amino group of the Lysine side chain with (2-[2-(2-Amino-ethoxy)-ethoxy]-acetyl)-(gamma-Glu)-CO-(CH2) 16-CO2H
  SITE 20: note = 2-Aminoisobutyric Acid
  SITE 21: note = L-ornithine
  SITE 24: note = D-amino acid
  SITE 25: note = alpha-methyl-L-tyrosine

SEQ ID NO: 374 - protein, 39 aa, synthetic construct
  SITE 2: note = 2-Aminoisobutyric Acid
  SITE 6: note = alpha-methyl-2-fluoro-L-phenylalanine
  SITE 11: note = alpha-methyl-L-serine
  SITE 13: note = alpha-methyl-leucine
  SITE 16: note = L-ornithine
  SITE 17: note = Lysine is chemically modified through conjugation of the epsilon-amino group of the Lysine side chain with (2-[2-(2-Amino-ethoxy)-ethoxy]-acetyl)-(gamma-Glu)-CO-(CH2) 16-CO2H
  SITE 20: note = 2-Aminoisobutyric Acid
  SITE 21: note = L-ornithine
  SITE 24: note = D-amino acid
  SITE 25: note = alpha-methyl-L-tyrosine
  SITE 39: note = Amidated residue
YXQGTXTSDYXIXLDXKAQXXFIEXLLEGGPSSGEPPPS

SEQ ID NO: 375 - protein, 39 aa, synthetic construct
  SITE 2: note = 2-Aminoisobutyric Acid
  SITE 6: note = alpha-methyl-2-fluoro-L-phenylalanine
  SITE 10: note = 3-(4-Pyridyl)-L-alanine
  SITE 11: note = alpha-methyl-L-serine
  SITE 13: note = alpha-methyl-leucine
  SITE 16: note = L-ornithine
  SITE 17: note = Lysine is chemically modified through conjugation of the epsilon-amino group of the Lysine side chain with (2-[2-(2-Amino-ethoxy)-ethoxy]-acetyl)-(gamma-Glu)-CO-(CH2) 16-CO2H
  SITE 20: note = 2-Aminoisobutyric Acid
  SITE 21: note = L-ornithine
  SITE 24: note = D-amino acid
  SITE 25: note = alpha-methyl-L-tyrosine
  SITE 39: note = Amidated residue
YXQGTXTSDXXIXLDXKAQXXFIEXLLEGGPSSGEPPPS

SEQ ID NO: 376 - protein, 39 aa, synthetic construct
  SITE 2: note = 2-Aminoisobutyric Acid
  SITE 6: note = alpha-methyl-2-fluoro-L-phenylalanine
  SITE 10: note = 3-(4-Pyridyl)-L-alanine
  SITE 13: note = alpha-methyl-leucine
  SITE 16: note = L-ornithine
  SITE 17: note = Lysine is chemically modified through conjugation of the epsilon-amino group of the Lysine side chain with (2-[2-(2-Amino-ethoxy)-ethoxy]-acetyl)-(gamma-Glu)-CO-(CH2) 16-CO2H
  SITE 20: note = 2-Aminoisobutyric Acid
  SITE 21: note = L-ornithine
  SITE 24: note = D-amino acid
  SITE 25: note = alpha-methyl-L-tyrosine
  SITE 39: note = Amidated residue
YXQGTXTSDXSIXLDXKAQXXFIEXLLEGGPSSGEPPPE

SEQ ID NO: 377 - protein, 39 aa, synthetic construct; identical to SEQ ID NO: 371
  SITE 2: note = 2-Aminoisobutyric Acid
  SITE 6: note = alpha-methyl-2-fluoro-L-phenylalanine
  SITE 10: note = 3-(4-Pyridyl)-L-alanine
  SITE 13: note = alpha-methyl-leucine
  SITE 16: note = L-ornithine
  SITE 17: note = Lysine is chemically modified through conjugation of the epsilon-amino group of the Lysine side chain with (gamma-Glu)2-CO-(CH2)16-CO2H
  SITE 20: note = 2-Aminoisobutyric Acid
  SITE 21: note = L-ornithine
  SITE 24: note = D-amino acid
  SITE 25: note = alpha-methyl-L-tyrosine
  SITE 39: note = Amidated residue

SEQ ID NO: 378 - protein, 39 aa, synthetic construct; identical to SEQ ID NO: 376
  SITE 2: note = 2-Aminoisobutyric Acid
  SITE 6: note = alpha-methyl-2-fluoro-L-phenylalanine
  SITE 10: note = 3-(4-Pyridyl)-L-alanine
  SITE 13: note = alpha-methyl-leucine
  SITE 16: note = L-ornithine
  SITE 17: note = Lysine is chemically modified through conjugation of the epsilon-amino group of the Lysine side chain with (gamma-Glu)2-CO-(CH2)16-CO2H
  SITE 20: note = 2-Aminoisobutyric Acid
  SITE 21: note = L-ornithine
  SITE 24: note = D-amino acid
  SITE 25: note = alpha-methyl-L-tyrosine
  SITE 39: note = Amidated residue

SEQ ID NO: 379 - protein, 39 aa, synthetic construct
  SITE 2: note = 2-Aminoisobutyric Acid
  SITE 6: note = alpha-methyl-2-fluoro-L-phenylalanine
  SITE 10: note = 3-(4-Pyridyl)-L-alanine
  SITE 13: note = alpha-methyl-leucine
  SITE 16: note = L-ornithine
  SITE 17: note = Lysine is chemically modified through conjugation of the epsilon-amino group of the Lysine side chain with (gamma-Glu)2-CO-(CH2)16-CO2H
  SITE 20: note = 2-Aminoisobutyric Acid
  SITE 21: note = L-ornithine
  SITE 24: note = D-amino acid
  SITE 25: note = alpha-methyl-L-tyrosine
  SITE 34: note = 2-Aminoisobutyric Acid
  SITE 39: note = Amidated residue
YXQGTXTSDXSIXLDXKAQXXFIEXLLEGGPSSXEPPPE

SEQ ID NO: 380 - protein, 39 aa, synthetic construct; identical to SEQ ID NO: 375
  SITE 2: note = 2-Aminoisobutyric Acid
  SITE 6: note = alpha-methyl-2-fluoro-L-phenylalanine
  SITE 10: note = 3-(4-Pyridyl)-L-alanine
  SITE 11: note = alpha-methyl-L-serine
  SITE 13: note = alpha-methyl-leucine
  SITE 16: note = L-ornithine
  SITE 17: note = Lysine is chemically modified through conjugation of the epsilon-amino group of the Lysine side chain with (gamma-Glu)2-CO-(CH2)16-CO2H
  SITE 20: note = 2-Aminoisobutyric Acid
  SITE 21: note = L-ornithine
  SITE 24: note = D-amino acid
  SITE 25: note = alpha-methyl-L-tyrosine
  SITE 39: note = Amidated residue

SEQ ID NO: 381 - protein, 39 aa, synthetic construct
  SITE 2: note = 2-Aminoisobutyric Acid
  SITE 6: note = alpha-methyl-2-fluoro-L-phenylalanine
  SITE 10: note = 3-(4-Pyridyl)-L-alanine
  SITE 11: note = alpha-methyl-L-serine
  SITE 13: note = alpha-methyl-leucine
  SITE 16: note = L-ornithine
  SITE 17: note = Lysine is chemically modified through conjugation of the epsilon-amino group of the Lysine side chain with (gamma-Glu)2-CO-(CH2)16-CO2H
  SITE 20: note = 2-Aminoisobutyric Acid
  SITE 21: note = L-ornithine
  SITE 24: note = D-amino acid
  SITE 25: note = alpha-methyl-L-tyrosine
  SITE 39: note = Amidated residue
YXQGTXTSDXXIXLDXKAQXXFIEXLIEGGPSSGEPPPS

SEQ ID NO: 382 - protein, 39 aa, synthetic construct; identical to SEQ ID NO: 375
  SITE 2: note = 2-Aminoisobutyric Acid
  SITE 6: note = alpha-methyl-2-fluoro-L-phenylalanine
  SITE 10: note = 3-(4-Pyridyl)-L-alanine
  SITE 11: note = alpha-methyl-L-serine
  SITE 13: note = alpha-methyl-leucine
  SITE 16: note = L-ornithine
  SITE 17: note = Lysine is chemically modified through conjugation of the epsilon-amino group of the Lysine side chain with (2-[2-(2-Amino-ethoxy)-ethoxy]-acetyl)-(gamma-Glu)2-CO-(CH2 )16-CO2H
  SITE 20: note = 2-Aminoisobutyric Acid
  SITE 21: note = L-ornithine
  SITE 24: note = D-amino acid
  SITE 25: note = alpha-methyl-L-tyrosine
  SITE 39: note = Amidated residue

SEQ ID NO: 383 - protein, 39 aa, synthetic construct
  SITE 2: note = 2-Aminoisobutyric Acid
  SITE 6: note = alpha-methyl-2-fluoro-L-phenylalanine
  SITE 10: note = 3-(4-Pyridyl)-L-alanine
  SITE 11: note = alpha-methyl-L-serine
  SITE 13: note = alpha-methyl-leucine
  SITE 16: note = L-ornithine
  SITE 17: note = Lysine is chemically modified through conjugation of the epsilon-amino group of the Lysine side chain with (2-[2-(2-Amino-ethoxy)-ethoxy]-acetyl)-(gamma-Glu)-CO-(CH2) 16-CO2H
  SITE 20: note = 2-Aminoisobutyric Acid
  SITE 21: note = L-ornithine
  SITE 24: note = D-amino acid
  SITE 25: note = alpha-methyl-L-tyrosine
  SITE 39: note = Amidated residue
YXQGTXTSDXXIXLDXKAQXXFIEXLLEGGPSSGEPPPE

SEQ ID NO: 384 - protein, 39 aa, synthetic construct
  SITE 2: note = 2-Aminoisobutyric Acid
  SITE 6: note = alpha-methyl-2-fluoro-L-phenylalanine
  SITE 10: note = 3-(4-Pyridyl)-L-alanine
  SITE 11: note = alpha-methyl-L-serine
  SITE 13: note = alpha-methyl-leucine
  SITE 16: note = L-ornithine
  SITE 17: note = Lysine is chemically modified through conjugation of the epsilon-amino group of the Lysine side chain with (2-[2-(2-Amino-ethoxy)-ethoxy]-acetyl)-(gamma-Glu)-CO-(CH2) 16-CO2H
  SITE 20: note = 2-Aminoisobutyric Acid
  SITE 21: note = L-ornithine
  SITE 24: note = D-amino acid
  SITE 25: note = alpha-methyl-L-tyrosine
  SITE 39: note = Amidated residue
YXQGTXTSDXXIXLDXKAQXXFIEXLIEGGPSSGEPPPE

SEQ ID NO: 385 - protein, 39 aa, synthetic construct
  SITE 2: note = 2-Aminoisobutyric Acid
  SITE 6: note = alpha-methyl-2-fluoro-L-phenylalanine
  SITE 10: note = 3-(4-Pyridyl)-L-alanine
  SITE 11: note = alpha-methyl-L-serine
  SITE 13: note = alpha-methyl-leucine
  SITE 16: note = L-ornithine
  SITE 17: note = Lysine is chemically modified through conjugation of the epsilon-amino group of the Lysine side chain with (2-[2-(2-Amino-ethoxy)-ethoxy]-acetyl)-(gamma-Glu)-CO-(CH2) 16-CO2H
  SITE 20: note = 2-Aminoisobutyric Acid
  SITE 21: note = L-ornithine
  SITE 24: note = D-amino acid
  SITE 25: note = alpha-methyl-L-tyrosine
  SITE 39: note = Amidated residue
HXQGTXTSDXXIXLDXKAQXXFIEXLLEGGPSSGEPPPE

SEQ ID NO: 386 - protein, 39 aa, synthetic construct
  SITE 2: note = 2-Aminoisobutyric Acid
  SITE 6: note = alpha-methyl-2-fluoro-L-phenylalanine
  SITE 10: note = 3-(4-Pyridyl)-L-alanine
  SITE 11: note = alpha-methyl-L-serine
  SITE 13: note = alpha-methyl-leucine
  SITE 16: note = L-ornithine
  SITE 17: note = Lysine is chemically modified through conjugation of the epsilon-amino group of the Lysine side chain with (2-[2-(2-Amino-ethoxy)-ethoxy]-acetyl)-(gamma-Glu)-CO-(CH2) 16-CO2H
  SITE 20: note = 2-Aminoisobutyric Acid
  SITE 21: note = L-ornithine
  SITE 24: note = D-amino acid
  SITE 25: note = alpha-methyl-L-tyrosine
  SITE 34: note = 2-Aminoisobutyric Acid
  SITE 39: note = Amidated residue
YXQGTXTSDXXIXLDXKAQXXFIEXLLEGGPSSXEPPPE

SEQ ID NO: 387 - protein, 39 aa, synthetic construct
  SITE 2: note = 2-Aminoisobutyric Acid
  SITE 6: note = alpha-methyl-2-fluoro-L-phenylalanine
  SITE 11: note = alpha-methyl-L-serine
  SITE 13: note = alpha-methyl-leucine
  SITE 16: note = L-ornithine
  SITE 17: note = Lysine is chemically modified through conjugation of the epsilon-amino group of the Lysine side chain with (2-[2-(2-Amino-ethoxy)-ethoxy]-acetyl)-(gamma-Glu)-CO-(CH2) 16-CO2H
  SITE 20: note = 2-Aminoisobutyric Acid
  SITE 24: note = D-amino acid
  SITE 39: note = Amidated residue
HXQGTXTSDYXIXLDXKAQXAFIEYLLEGGPSSGEPPPE

SEQ ID NO: 388 - protein, 39 aa, synthetic construct
  SITE 2: note = 2-Aminoisobutyric Acid
  SITE 11: note = alpha-methyl-L-serine
  SITE 13: note = alpha-methyl-leucine
  SITE 17: note = Lysine is chemically modified through conjugation of the epsilon-amino group of the Lysine side chain with (2-[2-(2-Amino-ethoxy)-ethoxy]-acetyl)2-(gamma-Glu)-CO-(CH2 )18-CO2H
  SITE 20: note = 2-Aminoisobutyric Acid
  SITE 39: note = Amidated residue
YXQGTFTSDYXIXLDKKAQXAFIEYLIEGGPSSGAPPPS

SEQ ID NO: 389 - protein, 41 aa, synthetic construct
  SITE 2: note = 2-Aminoisobutyric Acid
  SITE 6: note = alpha-methyl-2-fluoro-L-phenylalanine
  SITE 13: note = alpha-methyl-leucine
  SITE 17: note = Lysine is chemically modified through conjugation of the epsilon-amino group of the Lysine side chain with (2-[2-(2-Amino-ethoxy)-ethoxy]-acetyl)2-(gamma-Glu)-CO-(CH2 )18-CO2H
  SITE 20: note = 2-Aminoisobutyric Acid
  SITE 41: note = Amidated residue
YXQGTXTSDYSIXLDKKAAXAFIEYLIETGPSSGAPPPSEG

SEQ ID NO: 390 - protein, 39 aa, synthetic construct
  SITE 2: note = 2-Aminoisobutyric Acid
  SITE 6: note = alpha-methyl-2-fluoro-L-phenylalanine
  SITE 11: note = alpha-methyl-L-serine
  SITE 13: note = alpha-methyl-leucine
  SITE 16: note = L-ornithine
  SITE 17: note = Lysine is chemically modified through conjugation of the epsilon-amino group of the Lysine side chain with (2-[2-(2-Amino-ethoxy)-ethoxy]-acetyl)-(gamma-Glu)-CO-(CH2) 16-CO2H
  SITE 20: note = 2-Aminoisobutyric Acid
  SITE 21: note = L-ornithine
YXQGTXTSDYXIXLDXKAQXXFIEYLLEGGPSSGAPPPS

SEQ ID NO: 391 - protein, 39 aa, synthetic construct
  SITE 2: note = 2-Aminoisobutyric Acid
  SITE 6: note = alpha-methyl-2-fluoro-L-phenylalanine
  SITE 17: note = Lysine is chemically modified through conjugation of the epsilon-amino group of the Lysine side chain with (2-[2-(2-Amino-ethoxy)-ethoxy]-acetyl)2-(gamma-Glu)-CO-(CH2 )18-CO2H
  SITE 20: note = 2-Aminoisobutyric Acid
  SITE 39: note = Amidated residue
YXQGTXTSDYSILLDKKAQXAFIEYLLEGGPSSGAPPPS

SEQ ID NO: 392 - protein, 39 aa, synthetic construct
  SITE 2: note = 2-Aminoisobutyric Acid
  SITE 6: note = alpha-methyl-2-fluoro-L-phenylalanine
  SITE 17: note = Lysine is chemically modified through conjugation of the epsilon-amino group of the Lysine side chain with (2-[2-(2-Amino-ethoxy)-ethoxy]-acetyl)2-(gamma-Glu)-CO-(CH2 )18-CO2H
  SITE 20: note = 2-Aminoisobutyric Acid
  SITE 39: note = Amidated residue
YXQGTXTSDYSILLDKKAQXAFIEYLLEGGPSSGAPPPE

SEQ ID NO: 393 - protein, 39 aa, synthetic construct
  SITE 2: note = 2-Aminoisobutyric Acid
  SITE 6: note = alpha-methyl-2-fluoro-L-phenylalanine
  SITE 17: note = Lysine is chemically modified through conjugation of the epsilon-amino group of the Lysine side chain with (2-[2-(2-Amino-ethoxy)-ethoxy]-acetyl)-(gamma-Glu)-CO-(CH2) 16-CO2H
  SITE 20: note = 2-Aminoisobutyric Acid
  SITE 39: note = Amidated residue
YXQGTXTSDYSILLDKKAQXAFIEYLEEGGPSSGAPPPS

SEQ ID NO: 394 - protein, 39 aa, synthetic construct
  SITE 2: note = 2-Aminoisobutyric Acid
  SITE 6: note = alpha-methyl-2-fluoro-L-phenylalanine
  SITE 17: note = Lysine is chemically modified through conjugation of the epsilon-amino group of the Lysine side chain with (2-[2-(2-Amino-ethoxy)-ethoxy]-acetyl)-(gamma-Glu)-CO-(CH2) 16-CO2H
  SITE 20: note = 2-Aminoisobutyric Acid
  SITE 39: note = Amidated residue
YXQGTXTSDYSILLDKKAQXAFIEYLEEGGPSSGAPPPE

SEQ ID NO: 395 - protein, 39 aa, synthetic construct
  SITE 2: note = 2-Aminoisobutyric Acid
  SITE 6: note = alpha-methyl-L-phenylalanine
  SITE 11: note = alpha-methyl-L-serine
  SITE 13: note = alpha-methyl-leucine
  SITE 16: note = L-ornithine
  SITE 17: note = Lysine is chemically modified through conjugation of the epsilon-amino group of the Lysine side chain with (2-[2-(2-Amino-ethoxy)-ethoxy]-acetyl)-(gamma-Glu)-CO-(CH2) 16-CO2H
  SITE 20: note = 2-Aminoisobutyric Acid
  SITE 21: note = L-ornithine
  SITE 24: note = D-amino acid
  SITE 25: note = alpha-methyl-L-tyrosine
  SITE 39: note = Amidated residue
YXQGTXTSDYXSXLDXKAQXXFIEXLLEGGPSSGEPPPE

SEQ ID NO: 396 - protein, 39 aa, synthetic construct
  SITE 2: note = 2-Aminoisobutyric Acid
  SITE 6: note = alpha-methyl-L-phenylalanine
  SITE 11: note = alpha-methyl-L-serine
  SITE 16: note = L-ornithine
  SITE 17: note = Lysine is chemically modified through conjugation of the epsilon-amino group of the Lysine side chain with (2-[2-(2-Amino-ethoxy)-ethoxy]-acetyl)-(gamma-Glu)-CO-(CH2) 16-CO2H
  SITE 20: note = 2-Aminoisobutyric Acid
  SITE 21: note = L-ornithine
  SITE 24: note = D-amino acid
  SITE 25: note = alpha-methyl-L-tyrosine
  SITE 39: note = Amidated residue
YXQGTXTSDYXSLLDXKAQXXFIEXLLEGGPSSGEPPPE

SEQ ID NO: 397 - protein, 39 aa, synthetic construct
  SITE 2: note = 2-Aminoisobutyric Acid
  SITE 6: note = alpha-methyl-L-phenylalanine
  SITE 11: note = alpha-methyl-L-serine
  SITE 13: note = alpha-methyl-leucine
  SITE 16: note = L-ornithine
  SITE 17: note = Lysine is chemically modified through conjugation of the epsilon-amino group of the Lysine side chain with (2-[2-(2-Amino-ethoxy)-ethoxy]-acetyl)-(gamma-Glu)-CO-(CH2) 16-CO2H
  SITE 20: note = 2-Aminoisobutyric Acid
  SITE 21: note = L-ornithine
  SITE 24: note = D-amino acid
  SITE 39: note = Amidated residue
YXQGTXTSDYXIXLDXKAQXXFIEYLLEGGPSSGEPPPE

SEQ ID NO: 398 - protein, 39 aa, synthetic construct; identical to SEQ ID NO: 393
  SITE 2: note = 2-Aminoisobutyric Acid
  SITE 6: note = alpha-methyl-L-phenylalanine
  SITE 17: note = Lysine is chemically modified through conjugation of the epsilon-amino group of the Lysine side chain with (2-[2-(2-Amino-ethoxy)-ethoxy]-acetyl)-(gamma-Glu)-CO-(CH2) 16-CO2H
  SITE 20: note = 2-Aminoisobutyric Acid
  SITE 39: note = Amidated residue

SEQ ID NO: 399 - protein, 39 aa, synthetic construct
  SITE 2: note = 2-Aminoisobutyric Acid
  SITE 6: note = alpha-methyl-L-phenylalanine
  SITE 11: note = alpha-methyl-L-serine
  SITE 17: note = Lysine is chemically modified through conjugation of the epsilon-amino group of the Lysine side chain with (2-[2-(2-Amino-ethoxy)-ethoxy]-acetyl)-(gamma-Glu)-CO-(CH2) 16-CO2H
  SITE 20: note = 2-Aminoisobutyric Acid
  SITE 39: note = Amidated residue
YXQGTXTSDYXILLDKKAQXAFIEYLEEGGPSSGAPPPS

SEQ ID NO: 400 - protein, 39 aa, synthetic construct
  SITE 2: note = 2-Aminoisobutyric Acid
  SITE 6: note = alpha-methyl-L-phenylalanine
  SITE 13: note = alpha-methyl-leucine
  SITE 17: note = Lysine is chemically modified through conjugation of the epsilon-amino group of the Lysine side chain with (2-[2-(2-Amino-ethoxy)-ethoxy]-acetyl)-(gamma-Glu)-CO-(CH2) 16-CO2H
  SITE 20: note = 2-Aminoisobutyric Acid
  SITE 39: note = Amidated residue
YXQGTXTSDYSIXLDKKAQXAFIEYLEEGGPSSGAPPPS

SEQ ID NO: 401 - protein, 41 aa, synthetic construct
  SITE 2: note = 2-Aminoisobutyric Acid
  SITE 6: note = alpha-methyl-L-phenylalanine
  SITE 13: note = alpha-methyl-leucine
  SITE 17: note = Lysine is chemically modified through conjugation of the epsilon-amino group of the Lysine side chain with (2-[2-(2-Amino-ethoxy)-ethoxy]-acetyl)-(gamma-Glu)-CO-(CH2) 16-CO2H
  SITE 20: note = 2-Aminoisobutyric Acid
  SITE 41: note = Amidated residue
YXQGTXTSDYSIXLDKKAQXAFIEYLEEGGPSSGAPPPSEG

SEQ ID NO: 402 - protein, 39 aa, synthetic construct
  SITE 2: note = 2-Aminoisobutyric Acid
  SITE 6: note = alpha-methyl-L-phenylalanine
  SITE 13: note = alpha-methyl-leucine
  SITE 17: note = Lysine is chemically modified through conjugation of the epsilon-amino group of the Lysine side chain with (2-[2-(2-Amino-ethoxy)-ethoxy]-acetyl)-(gamma-Glu)-CO-(CH2) 16-CO2H
  SITE 20: note = 2-Aminoisobutyric Acid
  SITE 39: note = Amidated residue
YXQGTXTSDYSIXLDKKAQXAFIEYLEEGGPSSGAPPPE

SEQ ID NO: 403 - protein, 39 aa, synthetic construct
  SITE 2: note = 2-Aminoisobutyric Acid
  SITE 6: note = alpha-methyl-L-phenylalanine
  SITE 13: note = alpha-methyl-leucine
  SITE 16: note = L-ornithine
  SITE 17: note = Lysine is chemically modified through conjugation of the epsilon-amino group of the Lysine side chain with (2-[2-(2-Amino-ethoxy)-ethoxy]-acetyl)-(gamma-Glu)-CO-(CH2) 16-CO2H
  SITE 20: note = 2-Aminoisobutyric Acid
YXQGTXTSDYSIXLDXKAQXAFIEYLEEGGPSSGAPPPE

SEQ ID NO: 404 - protein, 41 aa, synthetic construct
  SITE 2: note = 2-Aminoisobutyric Acid
  SITE 6: note = alpha-methyl-2-fluoro-L-phenylalanine
  SITE 17: note = Lysine is chemically modified through conjugation of the epsilon-amino group of the Lysine side chain with (2-[2-(2-Amino-ethoxy)-ethoxy]-acetyl)-(gamma-Glu)-CO-(CH2) 16-CO2H
  SITE 20: note = 2-Aminoisobutyric Acid
  SITE 41: note = Amidated residue
YXQGTXTSDYSILLDKKAQXAFIEYLEEGGPSSGAPPPSEG

SEQ ID NO: 405 - protein, 41 aa, synthetic construct
  SITE 2: note = 2-Aminoisobutyric Acid
  SITE 6: note = alpha-methyl-2-fluoro-L-phenylalanine
  SITE 17: note = Lysine is chemically modified through conjugation of the epsilon-amino group of the Lysine side chain with (2-[2-(2-Amino-ethoxy)-ethoxy]-acetyl)-(gamma-Glu)-CO-(CH2) 16-CO2H
  SITE 20: note = 2-Aminoisobutyric Acid
  SITE 41: note = Amidated residue
YXQGTXTSDYSILLDKKAQXAFIEYLEEGGPSSGAPPPEEG

SEQ ID NO: 406 - protein, 39 aa, synthetic construct; identical to SEQ ID NO: 402
  SITE 2: note = 2-Aminoisobutyric Acid
  SITE 6: note = alpha-methyl-2-fluoro-L-phenylalanine
  SITE 13: note = alpha-methyl-leucine
  SITE 17: note = Lysine is chemically modified through conjugation of the epsilon-amino group of the Lysine side chain with (2-[2-(2-Amino-ethoxy)-ethoxy]-acetyl)-(gamma-Glu)-CO-(CH2) 16-CO2H
  SITE 20: note = 2-Aminoisobutyric Acid

SEQ ID NO: 407 - protein, 41 aa, synthetic construct
  SITE 2: note = 2-Aminoisobutyric Acid
  SITE 6: note = alpha-methyl-2-fluoro-L-phenylalanine
  SITE 10: note = 3-(4-Pyridyl)-L-alanine
  SITE 11: note = alpha-methyl-L-serine
  SITE 13: note = alpha-methyl-leucine
  SITE 16: note = L-ornithine
  SITE 17: note = Lysine is chemically modified through conjugation of the epsilon-amino group of the Lysine side chain with (2-[2-(2-Amino-ethoxy)-ethoxy]-acetyl)-(gamma-Glu)-CO-(CH2) 16-CO2H
  SITE 20: note = 2-Aminoisobutyric Acid
  SITE 21: note = L-ornithine
  SITE 24: note = D-amino acid
  SITE 25: note = alpha-methyl-L-tyrosine
  SITE 41: note = Amidated residue
YXQGTXTSDXXIXLDXKAQXXFIEXLIEGGPSSGEPPPSEG

SEQ ID NO: 408 - protein, 39 aa, synthetic construct
  SITE 2: note = 2-Aminoisobutyric Acid
  SITE 6: note = alpha-methyl-2-fluoro-L-phenylalanine
  SITE 11: note = alpha-methyl-L-serine
  SITE 13: note = alpha-methyl-leucine
  SITE 16: note = L-ornithine
  SITE 17: note = Lysine is chemically modified through conjugation of the epsilon-amino group of the Lysine side chain with (2-[2-(2-Amino-ethoxy)-ethoxy]-acetyl)2-(gamma-Glu)-CO-(CH2 )16-CO2H
  SITE 20: note = 2-Aminoisobutyric Acid
  SITE 21: note = L-ornithine
  SITE 24: note = D-amino acid
  SITE 25: note = alpha-methyl-L-tyrosine
  SITE 39: note = Amidated residue
YXQGTXTSDYXIXLDXKAQXXFIEXLEEGGPSSGEPPPE

SEQ ID NO: 409 - protein, 41 aa, synthetic construct
  SITE 2: note = 2-Aminoisobutyric Acid
  SITE 6: note = alpha-methyl-2-fluoro-L-phenylalanine
  SITE 11: note = alpha-methyl-L-serine
  SITE 13: note = alpha-methyl-leucine
  SITE 16: note = L-ornithine
  SITE 17: note = Lysine is chemically modified through conjugation of the epsilon-amino group of the Lysine side chain with (2-[2-(2-Amino-ethoxy)-ethoxy]-acetyl)-(gamma-Glu)-CO-(CH2) 16-CO2H
  SITE 20: note = 2-Aminoisobutyric Acid
  SITE 21: note = L-ornithine
  SITE 24: note = D-amino acid
  SITE 25: note = alpha-methyl-L-tyrosine
  SITE 41: note = Amidated residue
YXQGTXTSDYXIXLDXKAQXXFIEXLEEGGPSSGEPPPEEG

SEQ ID NO: 410 - protein, 41 aa, synthetic construct
  SITE 2: note = 2-Aminoisobutyric Acid
  SITE 6: note = alpha-methyl-2-fluoro-L-phenylalanine
  SITE 13: note = alpha-methyl-leucine
  SITE 16: note = L-ornithine
  SITE 17: note = Lysine is chemically modified through conjugation of the epsilon-amino group of the Lysine side chain with (2-[2-(2-Amino-ethoxy)-ethoxy]-acetyl)-(gamma-Glu)-CO-(CH2) 16-CO2H
  SITE 20: note = 2-Aminoisobutyric Acid
  SITE 24: note = D-amino acid
  SITE 41: note = Amidated residue
YXQGTXTSDYSIXLDXKAQXAFIEYLLEGGPSSGAPPPSEG

SEQ ID NO: 411 - protein, 41 aa, synthetic construct
  SITE 2: note = 2-Aminoisobutyric Acid
  SITE 13: note = alpha-methyl-leucine
  SITE 17: note = Lysine is chemically modified through conjugation of the epsilon-amino group of the Lysine side chain with (epsilon-K)2-(gamma-Glu)-CO-(CH2)18-CO2H
  SITE 20: note = 2-Aminoisobutyric Acid
  SITE 41: note = Amidated residue
YXQGTFTSDFSKXLDKKAQXAFIEYLAAGGPSSGEPPPSGE

SEQ ID NO: 412 - protein, 39 aa, synthetic construct; identical to SEQ ID NO: 393
  SITE 2: note = 2-Aminoisobutyric Acid
  SITE 6: note = alpha-methyl-2-fluoro-L-phenylalanine
  SITE 17: note = Lysine is chemically modified through conjugation of the epsilon-amino group of the Lysine side chain with (gamma-Glu)2-CO-(CH2)16-CO2H
  SITE 20: note = 2-Aminoisobutyric Acid
  SITE 39: note = Amidated residue

SEQ ID NO: 413 - protein, 39 aa, synthetic construct
  SITE 2: note = 2-Aminoisobutyric Acid
  SITE 6: note = alpha-methyl-2-fluoro-L-phenylalanine
  SITE 17: note = Lysine is chemically modified through conjugation of the epsilon-amino group of the Lysine side chain with (2-[2-(2-Amino-ethoxy)-ethoxy]-acetyl)-(gamma-Glu)-CO-(CH2) 16-CO2H
  SITE 20: note = 2-Aminoisobutyric Acid
  SITE 39: note = Amidated residue
YXQGTXTSDYSILLDKKAQXAFIEYLEEGGPSSGEPPPS

SEQ ID NO: 414 - protein, 39 aa, synthetic construct; identical to SEQ ID NO: 394
  SITE 2: note = 2-Aminoisobutyric Acid
  SITE 6: note = alpha-methyl-2-fluoro-L-phenylalanine
  SITE 17: note = Lysine is chemically modified through conjugation of the epsilon-amino group of the Lysine side chain with (2-[2-(2-Amino-ethoxy)-ethoxy]-acetyl)-(gamma-Glu)-CO-(CH2) 16-CO2H
  SITE 20: note = 2-Aminoisobutyric Acid
  SITE 39: note = Amidated residue

SEQ ID NO: 415 - protein, 39 aa, synthetic construct
  SITE 2: note = 2-Aminoisobutyric Acid
  SITE 6: note = alpha-methyl-2-fluoro-L-phenylalanine
  SITE 17: note = Lysine is chemically modified through conjugation of the epsilon-amino group of the Lysine side chain with (2-[2-(2-Amino-ethoxy)-ethoxy]-acetyl)-(gamma-Glu)-CO-(CH2) 16-CO2H
  SITE 20: note = 2-Aminoisobutyric Acid
  SITE 39: note = Amidated residue
YXQGTXTSDYSSLLDKKAQXAFIEYLEEGGPSSGAPPPS

SEQ ID NO: 416 - protein, 38 aa, synthetic construct
  SITE 2: note = 2-Aminoisobutyric Acid
  SITE 6: note = alpha-methyl-2-fluoro-L-phenylalanine
  SITE 17: note = Lysine is chemically modified through conjugation of the epsilon-amino group of the Lysine side chain with (2-[2-(2-Amino-ethoxy)-ethoxy]-acetyl)-(gamma-Glu)-CO-(CH2) 16-CO2H
  SITE 38: note = Amidated residue
YXQGTXTSDYSILLDAKAFIEYLEEGGPSSGAPPPSEG

SEQ ID NO: 417 - protein, 41 aa, synthetic construct
  SITE 2: note = 2-Aminoisobutyric Acid
  SITE 6: note = alpha-methyl-2-fluoro-L-phenylalanine
  SITE 17: note = Lysine is chemically modified through conjugation of the epsilon-amino group of the Lysine side chain with (2-[2-(2-Amino-ethoxy)-ethoxy]-acetyl)-(gamma-Glu)-CO-(CH2) 16-CO2H
  SITE 20: note = 2-Aminoisobutyric Acid
  SITE 25: note = 3-(4-Pyridyl)-L-alanine
  SITE 41: note = Amidated residue
YXQGTXTSDYSILLDKKAQXAFIEXLEEGGPSSGAPPPSEG

SEQ ID NO: 418 - protein, 41 aa, synthetic construct
  SITE 2: note = 2-Aminoisobutyric Acid
  SITE 6: note = alpha-methyl-2-fluoro-L-phenylalanine
  SITE 17: note = Lysine is chemically modified through conjugation of the epsilon-amino group of the Lysine side chain with (2-[2-(2-Amino-ethoxy)-ethoxy]-acetyl)-(gamma-Glu)-CO-(CH2) 16-CO2H
  SITE 20: note = 2-Aminoisobutyric Acid
  SITE 41: note = Amidated residue
YXQGTXTSDYSILLDKKAQXAFIEFLEEGGPSSGAPPPSEG

SEQ ID NO: 419 - protein, 39 aa, synthetic construct
  SITE 2: note = 2-Aminoisobutyric Acid
  SITE 6: note = alpha-methyl-2-fluoro-L-phenylalanine
  SITE 10: note = 3-(4-Pyridyl)-L-alanine
  SITE 17: note = Lysine is chemically modified through conjugation of the epsilon-amino group of the Lysine side chain with (gamma-Glu)2-CO-(CH2)16-CO2H
  SITE 20: note = 2-Aminoisobutyric Acid
  SITE 39: note = Amidated residue
YXQGTXTSDXSILLDKKAQXAFIEYLEEGGPSSGAPPPS

SEQ ID NO: 420 - protein, 39 aa, synthetic construct
  SITE 2: note = 2-Aminoisobutyric Acid
  SITE 6: note = alpha-methyl-2-fluoro-L-phenylalanine
  SITE 16: note = L-ornithine
  SITE 17: note = Lysine is chemically modified through conjugation of the epsilon-amino group of the Lysine side chain with (gamma-Glu)2-CO-(CH2)16-CO2H
  SITE 20: note = 2-Aminoisobutyric Acid
  SITE 39: note = Amidated residue
YXQGTXTSDYSILLDXKAQXAFIEYLEEGGPSSGAPPPS

SEQ ID NO: 421 - protein, 39 aa, synthetic construct
  SITE 2: note = 2-Aminoisobutyric Acid
  SITE 6: note = alpha-methyl-2-fluoro-L-phenylalanine
  SITE 17: note = Lysine is chemically modified through conjugation of the epsilon-amino group of the Lysine side chain with (gamma-Glu)2-CO-(CH2)16-CO2H
  SITE 20: note = 2-Aminoisobutyric Acid
  SITE 21: note = (S)-2-aminohexanedioic acid
  SITE 39: note = Amidated residue
YXQGTXTSDYSILLDKKAQXXFIEYLEEGGPSSGAPPPS

SEQ ID NO: 422 - protein, 39 aa, synthetic construct
  SITE 2: note = 2-Aminoisobutyric Acid
  SITE 6: note = alpha-methyl-2-fluoro-L-phenylalanine
  SITE 17: note = Lysine is chemically modified through conjugation of the epsilon-amino group of the Lysine side chain with (gamma-Glu)2-CO-(CH2)16-CO2H
  SITE 20: note = 2-Aminoisobutyric Acid
  SITE 39: note = Amidated residue
YXQGTXTSDYSILLDKKAQXNFIEYLEEGGPSSGAPPPS

SEQ ID NO: 423 - protein, 41 aa, synthetic construct
  SITE 2: note = 2-Aminoisobutyric Acid
  SITE 6: note = alpha-methyl-2-fluoro-L-phenylalanine
  SITE 13: note = alpha-methyl-leucine
  SITE 17: note = Lysine is chemically modified through conjugation of the epsilon-amino group of the Lysine side chain with (2-[2-(2-Amino-ethoxy)-ethoxy]-acetyl)-(gamma-Glu)-CO-(CH2) 16-CO2H
  SITE 20: note = 2-Aminoisobutyric Acid
  SITE 41: note = Amidated residue
YXQGTXTSDYSIXLDKKAQXAFIEYLLETGPSSGAPPPSEG

SEQ ID NO: 424 - protein, 39 aa, synthetic construct
  SITE 2: note = 2-Aminoisobutyric Acid
  SITE 6: note = alpha-methyl-L-phenylalanine
  SITE 10: note = 3-(4-Pyridyl)-L-alanine
  SITE 17: note = Lysine is chemically modified through conjugation of the epsilon-amino group of the Lysine side chain with (2-[2-(2-Amino-ethoxy)-ethoxy]-acetyl)2-(gamma-Glu)-CO-(CH2 )16-CO2H
  SITE 20: note = 2-Aminoisobutyric Acid
  SITE 39: note = Amidated residue
YXQGTXTSDXSILLDKKAQXAFIEYLLEGGPSSGAPPPS

SEQ ID NO: 425 - protein, 39 aa, synthetic construct; identical to SEQ ID NO: 391
  SITE 2: note = 2-Aminoisobutyric Acid
  SITE 6: note = alpha-methyl-L-phenylalanine
  SITE 17: note = Lysine is chemically modified through conjugation of the epsilon-amino group of the Lysine side chain with (2-[2-(2-Amino-ethoxy)-ethoxy]-acetyl)2-(gamma-Glu)-CO-(CH2 )16-CO2H
  SITE 20: note = 2-Aminoisobutyric Acid
  SITE 24: note = D-amino acid
  SITE 39: note = Amidated residue

SEQ ID NO: 426 - protein, 39 aa, synthetic construct
  SITE 2: note = 2-Aminoisobutyric Acid
  SITE 6: note = alpha-methyl-L-phenylalanine
  SITE 11: note = alpha-methyl-L-serine
  SITE 13: note = alpha-methyl-leucine
  SITE 16: note = L-ornithine
  SITE 17: note = Lysine is chemically modified through conjugation of the epsilon-amino group of the Lysine side chain with (2-[2-(2-Amino-ethoxy)-ethoxy]-acetyl)-(gamma-Glu)-CO-(CH2) 16-CO2H
  SITE 20: note = 2-Aminoisobutyric Acid
  SITE 24: note = D-amino acid
  SITE 39: note = Amidated residue
YXQGTXTSDYXIXLDXKAQXAFIEYLLEGGPSSGEPPPE

SEQ ID NO: 427 - protein, 39 aa, synthetic construct; identical to SEQ ID NO: 400
  SITE 2: note = 2-Aminoisobutyric Acid
  SITE 6: note = alpha-methyl-2-fluoro-L-phenylalanine
  SITE 13: note = alpha-methyl-leucine
  SITE 17: note = Lysine is chemically modified through conjugation of the epsilon-amino group of the Lysine side chain with (2-[2-(2-Amino-ethoxy)-ethoxy]-acetyl)-(gamma-Glu)-CO-(CH2) 16-CO2H
  SITE 20: note = 2-Aminoisobutyric Acid
  SITE 39: note = Amidated residue

SEQ ID NO: 428 - protein, 39 aa, synthetic construct
  SITE 2: note = 2-Aminoisobutyric Acid
  SITE 6: note = alpha-methyl-2-fluoro-L-phenylalanine
  SITE 10: note = 3-(4-Pyridyl)-L-alanine
  SITE 13: note = alpha-methyl-leucine
  SITE 17: note = Lysine is chemically modified through conjugation of the epsilon-amino group of the Lysine side chain with (2-[2-(2-Amino-ethoxy)-ethoxy]-acetyl)-(gamma-Glu)-CO-(CH2) 16-CO2H
  SITE 20: note = 2-Aminoisobutyric Acid
  SITE 39: note = Amidated residue
YXQGTXTSDXSIXLDKKAQXAFIEYLEEGGPSSGAPPPS

SEQ ID NO: 429 - protein, 39 aa, synthetic construct
  SITE 2: note = 2-Aminoisobutyric Acid
  SITE 6: note = alpha-methyl-2-fluoro-L-phenylalanine
  SITE 13: note = alpha-methyl-leucine
  SITE 17: note = Lysine is chemically modified through conjugation of the epsilon-amino group of the Lysine side chain with (2-[2-(2-Amino-ethoxy)-ethoxy]-acetyl)-(gamma-Glu)-CO-(CH2) 16-CO2H
  SITE 20: note = 2-Aminoisobutyric Acid
  SITE 39: note = Amidated residue
YXQGTXTSDYSIXLDKKAQXAFIEYLEEGGPSSGAPEPS

SEQ ID NO: 430 - protein, 40 aa, synthetic construct
  SITE 2: note = 2-Aminoisobutyric Acid
  SITE 6: note = alpha-methyl-2-fluoro-L-phenylalanine
  SITE 13: note = alpha-methyl-leucine
  SITE 17: note = Lysine is chemically modified through conjugation of the epsilon-amino group of the Lysine side chain with (2-[2-(2-Amino-ethoxy)-ethoxy]-acetyl)-(gamma-Glu)-CO-(CH2) 16-CO2H
  SITE 20: note = 2-Aminoisobutyric Acid
  SITE 40: note = Amidated residue
YXQGTXTSDYSIXLDKKAQXAFIEYLEEGGPSSGAPPPSE

SEQ ID NO: 431 - protein, 39 aa, synthetic construct
  SITE 2: note = 2-Aminoisobutyric Acid
  SITE 6: note = alpha-methyl-2-fluoro-L-phenylalanine
  SITE 17: note = Lysine is chemically modified through conjugation of the epsilon-amino group of the Lysine side chain with (2-[2-(2-Amino-ethoxy)-ethoxy]-acetyl)-(gamma-Glu)-CO-(CH2) 16-CO2H
  SITE 20: note = 2-Aminoisobutyric Acid
  SITE 39: note = Amidated residue
HXQGTXTSDYSILLDKKAQXAFIEYLEEGGPSSGAPPPS

SEQ ID NO: 432 - protein, 39 aa, synthetic construct; identical to SEQ ID NO: 431
  SITE 2: note = 2-Aminoisobutyric Acid
  SITE 6: note = alpha-methyl-2-fluoro-L-phenylalanine
  SITE 17: note = Lysine is chemically modified through conjugation of the epsilon-amino group of the Lysine side chain with (gamma-Glu)2-CO-(CH2)16-CO2H
  SITE 20: note = 2-Aminoisobutyric Acid
  SITE 39: note = Amidated residue

SEQ ID NO: 433 - protein, 39 aa, synthetic construct
  SITE 2: note = 2-Aminoisobutyric Acid
  SITE 6: note = alpha-methyl-2-fluoro-L-phenylalanine
  SITE 16: note = L-ornithine
  SITE 17: note = Lysine is chemically modified through conjugation of the epsilon-amino group of the Lysine side chain with (2-[2-(2-Amino-ethoxy)-ethoxy]-acetyl)2-(gamma-Glu)-CO-(CH2 )16-CO2H
  SITE 20: note = 2-Aminoisobutyric Acid
  SITE 24: note = D-amino acid
  SITE 39: note = Amidated residue
YXQGTXTSDYSILLDXKAQXAFIEYLLEGGPSSGAPPPS

SEQ ID NO: 434 - protein, 39 aa, synthetic construct; identical to SEQ ID NO: 433
  SITE 2: note = 2-Aminoisobutyric Acid
  SITE 6: note = alpha-methyl-2-fluoro-L-phenylalanine
  SITE 16: note = L-ornithine
  SITE 17: note = Lysine is chemically modified through conjugation of the epsilon-amino group of the Lysine side chain with (gamma-Glu)2-CO-(CH2)16-CO2H
  SITE 20: note = 2-Aminoisobutyric Acid
  SITE 24: note = D-amino acid
  SITE 39: note = Amidated residue

SEQ ID NO: 435 - protein, 41 aa, synthetic construct
  SITE 2: note = 2-Aminoisobutyric Acid
  SITE 6: note = alpha-methyl-2-fluoro-L-phenylalanine
  SITE 10: note = 3-(4-Pyridyl)-L-alanine
  SITE 11: note = alpha-methyl-L-serine
  SITE 13: note = alpha-methyl-leucine
  SITE 16: note = L-ornithine
  SITE 17: note = Lysine is chemically modified through conjugation of the epsilon-amino group of the Lysine side chain with (2-[2-(2-Amino-ethoxy)-ethoxy]-acetyl)-(gamma-Glu)-CO-(CH2) 16-CO2H
  SITE 20: note = 2-Aminoisobutyric Acid
  SITE 21: note = L-ornithine
  SITE 24: note = D-amino acid
  SITE 25: note = alpha-methyl-L-tyrosine
  SITE 41: note = Amidated residue
YXQGTXTSDXXIXLDXKAQXXFIEXLIEGGPSSGAPEPSEG

SEQ ID NO: 436 - protein, 39 aa, synthetic construct
  SITE 2: note = 2-Aminoisobutyric Acid
  SITE 6: note = alpha-methyl-2-fluoro-L-phenylalanine
  SITE 20: note = 2-Aminoisobutyric Acid
  SITE 24: note = Lysine is chemically modified through conjugation of the epsilon-amino group of the Lysine side chain with (2-[2-(2-Amino-ethoxy)-ethoxy]-acetyl)-(gamma-Glu)-CO-(CH2) 16-CO2H
  SITE 39: note = Amidated residue
YXQGTXTSDYSILLDKIAQXAFIKYLEEGGPSSGAPPPS

SEQ ID NO: 437 - protein, 41 aa, synthetic construct; identical to SEQ ID NO: 401
  SITE 2: note = 2-Aminoisobutyric Acid
  SITE 6: note = alpha-methyl-2-fluoro-L-phenylalanine
  SITE 13: note = alpha-methyl-leucine
  SITE 17: note = Lysine is chemically modified through conjugation of the epsilon-amino group of the Lysine side chain with (2-[2-(2-Amino-ethoxy)-ethoxy]-acetyl)-(gamma-Glu)-CO-(CH2) 16-CO2H
  SITE 20: note = 2-Aminoisobutyric Acid
  SITE 41: note = Amidated residue

SEQ ID NO: 438 - protein, 39 aa, synthetic construct; identical to SEQ ID NO: 413
  SITE 2: note = 2-Aminoisobutyric Acid
  SITE 6: note = alpha-methyl-2-fluoro-L-phenylalanine
  SITE 17: note = Lysine is chemically modified through conjugation of the epsilon-amino group of the Lysine side chain with (gamma-Glu)2-CO-(CH2)16-CO2H
  SITE 20: note = 2-Aminoisobutyric Acid
  SITE 39: note = Amidated residue

SEQ ID NO: 439 - protein, 40 aa, synthetic construct
  SITE 2: note = 2-Aminoisobutyric Acid
  SITE 6: note = alpha-methyl-2-fluoro-L-phenylalanine
  SITE 17: note = Lysine is chemically modified through conjugation of the epsilon-amino group of the Lysine side chain with (gamma-Glu)2-CO-(CH2)16-CO2H
  SITE 20: note = 2-Aminoisobutyric Acid
  SITE 40: note = Amidated residue
YXQGTXTSDYSILLDKKAQXAFIEYLEEGGPSSGAPPPSE

SEQ ID NO: 440 - protein, 41 aa, synthetic construct; identical to SEQ ID NO: 404
  SITE 2: note = 2-Aminoisobutyric Acid
  SITE 6: note = alpha-methyl-2-fluoro-L-phenylalanine
  SITE 17: note = Lysine is chemically modified through conjugation of the epsilon-amino group of the Lysine side chain with (gamma-Glu)2-CO-(CH2)16-CO2H
  SITE 20: note = 2-Aminoisobutyric Acid
  SITE 41: note = Amidated residue

SEQ ID NO: 441 - protein, 41 aa, synthetic construct
  SITE 2: note = 2-Aminoisobutyric Acid
  SITE 6: note = alpha-methyl-2-fluoro-L-phenylalanine
  SITE 17: note = Lysine is chemically modified through conjugation of the epsilon-amino group of the Lysine side chain with (gamma-Glu)2-CO-(CH2)16-CO2H
  SITE 20: note = 2-Aminoisobutyric Acid
  SITE 41: note = Amidated residue
YXQGTXTSDYSILLDKKAQXAFIEYLEEGGPSSGAPPPSGE

SEQ ID NO: 442 - protein, 39 aa, synthetic construct
  SITE 2: note = 2-Aminoisobutyric Acid
  SITE 6: note = alpha-methyl-2-fluoro-L-phenylalanine
  SITE 10: note = 3-(4-Pyridyl)-L-alanine
  SITE 11: note = alpha-methyl-L-serine
  SITE 13: note = alpha-methyl-leucine
  SITE 16: note = L-ornithine
  SITE 17: note = Lysine is chemically modified through conjugation of the epsilon-amino group of the Lysine side chain with (gamma-Glu)2-CO-(CH2)16-CO2H
  SITE 20: note = 2-Aminoisobutyric Acid
  SITE 24: note = D-amino acid
  SITE 25: note = alpha-methyl-L-tyrosine
  SITE 39: note = Amidated residue
YXQGTXTSDXXIXLDXKAQXSFIEXLIEGGPSSGEPPPE

SEQ ID NO: 443 - protein, 39 aa, synthetic construct
  SITE 2: note = 2-Aminoisobutyric Acid
  SITE 6: note = alpha-methyl-2-fluoro-L-phenylalanine
  SITE 10: note = 3-(4-Pyridyl)-L-alanine
  SITE 11: note = alpha-methyl-L-serine
  SITE 13: note = alpha-methyl-leucine
  SITE 16: note = L-ornithine
  SITE 17: note = Lysine is chemically modified through conjugation of the epsilon-amino group of the Lysine side chain with (gamma-Glu)2-CO-(CH2)16-CO2H
  SITE 20: note = 2-Aminoisobutyric Acid
  SITE 21: note = L-ornithine
  SITE 24: note = D-amino acid
  SITE 25: note = alpha-methyl-L-tyrosine
  SITE 39: note = Amidated residue
YXQGTXTSDXXIXLDXKAQXXFIEXLAEGGPSSGEPPPE

SEQ ID NO: 444 - protein, 39 aa, synthetic construct
  SITE 2: note = 2-Aminoisobutyric Acid
  SITE 6: note = alpha-methyl-2-fluoro-L-phenylalanine
  SITE 10: note = 3-(4-Pyridyl)-L-alanine
  SITE 11: note = alpha-methyl-L-serine
  SITE 13: note = alpha-methyl-leucine
  SITE 16: note = L-ornithine
  SITE 17: note = Lysine is chemically modified through conjugation of the epsilon-amino group of the Lysine side chain with (gamma-Glu)2-CO-(CH2)16-CO2H
  SITE 20: note = 2-Aminoisobutyric Acid
  SITE 21: note = L-ornithine
  SITE 24: note = D-amino acid
  SITE 25: note = alpha-methyl-L-tyrosine
  SITE 39: note = Amidated residue
YXQGTXTSDXXIXLDXKAQXXFIEXLSEGGPSSGEPPPE

SEQ ID NO: 445 - protein, 39 aa, synthetic construct
  SITE 2: note = 2-Aminoisobutyric Acid
  SITE 6: note = alpha-methyl-2-fluoro-L-phenylalanine
  SITE 10: note = 3-(4-Pyridyl)-L-alanine
  SITE 11: note = alpha-methyl-L-serine
  SITE 13: note = alpha-methyl-leucine
  SITE 16: note = L-ornithine
  SITE 17: note = Lysine is chemically modified through conjugation of the epsilon-amino group of the Lysine side chain with (gamma-Glu)2-CO-(CH2)16-CO2H
  SITE 20: note = 2-Aminoisobutyric Acid
  SITE 21: note = L-ornithine
  SITE 24: note = D-amino acid
  SITE 25: note = alpha-methyl-L-tyrosine
  SITE 39: note = Amidated residue
YXQGTXTSDXXIXLDXKAQXXFIEXLQEGGPSSGEPPPE

SEQ ID NO: 446 - protein, 39 aa, synthetic construct; identical to SEQ ID NO: 428
  SITE 2: note = 2-Aminoisobutyric Acid
  SITE 6: note = alpha-methyl-2-fluoro-L-phenylalanine
  SITE 10: note = 3-(4-Pyridyl)-L-alanine
  SITE 13: note = alpha-methyl-leucine
  SITE 17: note = Lysine is chemically modified through conjugation of the epsilon-amino group of the Lysine side chain with (gamma-Glu)2-CO-(CH2)16-CO2H
  SITE 20: note = 2-Aminoisobutyric Acid
  SITE 39: note = Amidated residue

SEQ ID NO: 447 - protein, 39 aa, synthetic construct
  SITE 2: note = 2-Aminoisobutyric Acid
  SITE 6: note = alpha-methyl-2-fluoro-L-phenylalanine
  SITE 10: note = 3-(4-Pyridyl)-L-alanine
  SITE 13: note = alpha-methyl-leucine
  SITE 16: note = L-ornithine
  SITE 17: note = Lysine is chemically modified through conjugation of the epsilon-amino group of the Lysine side chain with (gamma-Glu)2-CO-(CH2)16-CO2H
  SITE 20: note = 2-Aminoisobutyric Acid
  SITE 39: note = Amidated residue
YXQGTXTSDXSIXLDXKAQXAFIEYLEEGGPSSGAPPPS

SEQ ID NO: 448 - protein, 39 aa, synthetic construct
  SITE 2: note = 2-Aminoisobutyric Acid
  SITE 6: note = alpha-methyl-2-fluoro-L-phenylalanine
  SITE 10: note = 3-(4-Pyridyl)-L-alanine
  SITE 13: note = alpha-methyl-leucine
  SITE 17: note = Lysine is chemically modified through conjugation of the epsilon-amino group of the Lysine side chain with (2-[2-(2-Amino-ethoxy)-ethoxy]-acetyl)-(gamma-Glu)-CO-(CH2) 16-CO2H
  SITE 20: note = 2-Aminoisobutyric Acid
  SITE 39: note = Amidated residue
YXQGTXTSDXSIXLDKKAQXAFIEYLEEGGPSSGEPPPS

SEQ ID NO: 449 - protein, 39 aa, synthetic construct
  SITE 2: note = 2-Aminoisobutyric Acid
  SITE 6: note = alpha-methyl-2-fluoro-L-phenylalanine
  SITE 10: note = 3-(4-Pyridyl)-L-alanine
  SITE 13: note = alpha-methyl-leucine
  SITE 17: note = Lysine is chemically modified through conjugation of the epsilon-amino group of the Lysine side chain with (2-[2-(2-Amino-ethoxy)-ethoxy]-acetyl)-(gamma-Glu)-CO-(CH2) 16-CO2H
  SITE 20: note = 2-Aminoisobutyric Acid
  SITE 39: note = Amidated residue
YXQGTXTSDXSIXLDKKAQXAFIEYLEEGGPSSGAPEPS

SEQ ID NO: 450 - protein, 39 aa, synthetic construct
  SITE 2: note = 2-Aminoisobutyric Acid
  SITE 6: note = alpha-methyl-2-fluoro-L-phenylalanine
  SITE 10: note = 3-(4-Pyridyl)-L-alanine
  SITE 11: note = alpha-methyl-L-serine
  SITE 13: note = alpha-methyl-leucine
  SITE 16: note = L-ornithine
  SITE 20: note = 2-Aminoisobutyric Acid
  SITE 21: note = L-ornithine
  SITE 24: note = D-amino acid
  SITE 25: note = alpha-methyl-L-tyrosine
  SITE 28: note = Lysine is chemically modified through conjugation of the epsilon-amino group of the Lysine side chain with (2-[2-(2-Amino-ethoxy)-ethoxy]-acetyl)-(gamma-Glu)-CO-(CH2) 16-CO2H
YXQGTXTSDXXIXLDXIAQXXFIEXLIKGGPSSGEPPPE

SEQ ID NO: 451 - protein, 39 aa, synthetic construct
  SITE 2: note = 2-Aminoisobutyric Acid
  SITE 6: note = alpha-methyl-2-fluoro-L-phenylalanine
  SITE 10: note = 3-(4-Pyridyl)-L-alanine
  SITE 13: note = alpha-methyl-leucine
  SITE 17: note = Lysine is chemically modified through conjugation of the epsilon-amino group of the Lysine side chain with (2-[2-(2-Amino-ethoxy)-ethoxy]-acetyl)-(gamma-Glu)-CO-(CH2) 16-CO2H
  SITE 20: note = 2-Aminoisobutyric Acid
  SITE 39: note = Amidated residue
YXQGTXTSDXSIXLDKKAQXAFIEYLEEGGPSSGAPPPE

SEQ ID NO: 452 - protein, 39 aa, synthetic construct
  SITE 2: note = 2-Aminoisobutyric Acid
  SITE 6: note = alpha-methyl-2-fluoro-L-phenylalanine
  SITE 10: note = 3-(4-Pyridyl)-L-alanine
  SITE 13: note = alpha-methyl-leucine
  SITE 17: note = Lysine is chemically modified through conjugation of the epsilon-amino group of the Lysine side chain with (gamma-Glu)2-CO-(CH2)16-CO2H
  SITE 20: note = 2-Aminoisobutyric Acid
  SITE 39: note = Amidated residue
YXQGTXTSDXSIXLDKKAQXAFIEYLSEGGPSSGAPPPS

SEQ ID NO: 453 - protein, 39 aa, synthetic construct
  SITE 2: note = 2-Aminoisobutyric Acid
  SITE 6: note = alpha-methyl-2-fluoro-L-phenylalanine
  SITE 10: note = 3-(4-Pyridyl)-L-alanine
  SITE 11: note = alpha-methyl-L-serine
  SITE 13: note = alpha-methyl-leucine
  SITE 16: note = L-ornithine
  SITE 17: note = Lysine is chemically modified through conjugation of the epsilon-amino group of the Lysine side chain with (gamma-Glu)2-CO-(CH2)16-CO2H
  SITE 20: note = 2-Aminoisobutyric Acid
  SITE 21: note = L-ornithine
  SITE 24: note = D-amino acid
  SITE 25: note = alpha-methyl-L-tyrosine
  SITE 39: note = Amidated residue
YXQGTXTSDXXEXLDXKAQXXFIEXLIEGGPSSGEPPPE

SEQ ID NO: 454 - protein, 39 aa, synthetic construct
  SITE 2: note = 2-Aminoisobutyric Acid
  SITE 6: note = alpha-methyl-2-fluoro-L-phenylalanine
  SITE 10: note = 3-(4-Pyridyl)-L-alanine
  SITE 11: note = alpha-methyl-L-serine
  SITE 13: note = alpha-methyl-leucine
  SITE 16: note = L-ornithine
  SITE 17: note = Lysine is chemically modified through conjugation of the epsilon-amino group of the Lysine side chain with (gamma-Glu)2-CO-(CH2)16-CO2H
  SITE 20: note = 2-Aminoisobutyric Acid
  SITE 21: note = L-ornithine
  SITE 24: note = D-amino acid
  SITE 39: note = Amidated residue
YXQGTXTSDXXIXLDXKAQXXFIEYLIEGGPSSGEPPPE

SEQ ID NO: 455 - protein, 39 aa, synthetic construct
  SITE 2: note = 2-Aminoisobutyric Acid
  SITE 6: note = alpha-methyl-2-fluoro-L-phenylalanine
  SITE 10: note = 3-(4-Pyridyl)-L-alanine
  SITE 11: note = alpha-methyl-L-serine
  SITE 13: note = alpha-methyl-leucine
  SITE 16: note = L-ornithine
  SITE 17: note = Lysine is chemically modified through conjugation of the epsilon-amino group of the Lysine side chain with (gamma-Glu)2-CO-(CH2)16-CO2H
  SITE 20: note = 2-Aminoisobutyric Acid
  SITE 24: note = D-amino acid
  SITE 39: note = Amidated residue
YXQGTXTSDXXIXLDXKAQXNFIEYLIEGGPSSGEPPPE

SEQ ID NO: 456 - protein, 39 aa, synthetic construct
  SITE 2: note = 2-Aminoisobutyric Acid
  SITE 6: note = alpha-methyl-2-fluoro-L-phenylalanine
  SITE 10: note = 3-(4-Pyridyl)-L-alanine
  SITE 11: note = alpha-methyl-L-serine
  SITE 13: note = alpha-methyl-leucine
  SITE 16: note = L-ornithine
  SITE 17: note = Lysine is chemically modified through conjugation of the epsilon-amino group of the Lysine side chain with (gamma-Glu)2-CO-(CH2)16-CO2H
  SITE 20: note = 2-Aminoisobutyric Acid
  SITE 24: note = D-amino acid
  SITE 25: note = alpha-methyl-L-tyrosine
  SITE 39: note = Amidated residue
YXQGTXTSDXXIXLDXKAQXNFIEXLQEGGPSSGEPPPE

SEQ ID NO: 457 - protein, 39 aa, synthetic construct
  SITE 2: note = 2-Aminoisobutyric Acid
  SITE 6: note = alpha-methyl-2-fluoro-L-phenylalanine
  SITE 10: note = 3-(4-Pyridyl)-L-alanine
  SITE 11: note = alpha-methyl-L-serine
  SITE 13: note = alpha-methyl-leucine
  SITE 16: note = L-ornithine
  SITE 17: note = Lysine is chemically modified through conjugation of the epsilon-amino group of the Lysine side chain with (2-[2-(2-Amino-ethoxy)-ethoxy]-acetyl)-(gamma-Glu)2-CO-(CH2 )16-CO2H
  SITE 20: note = 2-Aminoisobutyric Acid
  SITE 24: note = D-amino acid
  SITE 25: note = alpha-methyl-L-tyrosine
  SITE 39: note = Amidated residue
YXQGTXTSDXXIXLDXKAQXNFIEXLIEGGPSSGEPPPE

SEQ ID NO: 458 - protein, 39 aa, synthetic construct
  SITE 2: note = 2-Aminoisobutyric Acid
  SITE 6: note = alpha-methyl-2-fluoro-L-phenylalanine
  SITE 10: note = 3-(4-Pyridyl)-L-alanine
  SITE 11: note = alpha-methyl-L-serine
  SITE 13: note = alpha-methyl-leucine
  SITE 16: note = L-ornithine
  SITE 17: note = Lysine is chemically modified through conjugation of the epsilon-amino group of the Lysine side chain with (gamma-Glu)2-CO-(CH2)16-CO2H
  SITE 20: note = 2-Aminoisobutyric Acid
  SITE 24: note = D-amino acid
  SITE 25: note = alpha-methyl-L-tyrosine
  SITE 39: note = Amidated residue
YXQGTXTSDXXIXLDXKAQXNFIEXLIEGGPSSGEPEPE

SEQ ID NO: 459 - protein, 39 aa, synthetic construct; identical to SEQ ID NO: 384
  SITE 2: note = 2-Aminoisobutyric Acid
  SITE 6: note = alpha-methyl-2-fluoro-L-phenylalanine
  SITE 10: note = 3-(4-Pyridyl)-L-alanine
  SITE 11: note = alpha-methyl-L-serine
  SITE 13: note = alpha-methyl-leucine
  SITE 16: note = L-ornithine
  SITE 17: note = Lysine is chemically modified through conjugation of the epsilon-amino group of the Lysine side chain with (2-[2-(2-Amino-ethoxy)-ethoxy]-acetyl)-(gamma-Glu)-CO-(CH2) 16-CO2H
  SITE 20: note = 2-Aminoisobutyric Acid
  SITE 21: note = L-ornithine
  SITE 24: note = D-amino acid
  SITE 25: note = alpha-methyl-3-(4-Pyridyl)-L-alanine
  SITE 39: note = Amidated residue

SEQ ID NO: 460 - protein, 39 aa, synthetic construct
  SITE 2: note = 2-Aminoisobutyric Acid
  SITE 6: note = alpha-methyl-2-fluoro-L-phenylalanine
  SITE 10: note = 3-(4-Pyridyl)-L-alanine
  SITE 16: note = L-ornithine
  SITE 20: note = 2-Aminoisobutyric Acid
  SITE 24: note = Lysine is chemically modified through conjugation of the epsilon-amino group of the Lysine side chain with (2-[2-(2-Amino-ethoxy)-ethoxy]-acetyl)-(gamma-Glu)-CO-(CH2) 16-CO2H
  SITE 39: note = Amidated residue
YXQGTXTSDXSILLDXIAQXAFIKYLEEGGPSSGAPPPS

SEQ ID NO: 461 - protein, 39 aa, synthetic construct
  SITE 2: note = 2-Aminoisobutyric Acid
  SITE 6: note = alpha-methyl-2-fluoro-L-phenylalanine
  SITE 13: note = alpha-methyl-leucine
  SITE 20: note = 2-Aminoisobutyric Acid
  SITE 24: note = Lysine is chemically modified through conjugation of the epsilon-amino group of the Lysine side chain with (2-[2-(2-Amino-ethoxy)-ethoxy]-acetyl)-(gamma-Glu)-CO-(CH2) 16-CO2H
  SITE 39: note = Amidated residue
YXQGTXTSDYSIXLDKIAQXAFIKYLEEGGPSSGAPPPS

SEQ ID NO: 462 - protein, 39 aa, synthetic construct; identical to SEQ ID NO: 457
  SITE 2: note = 2-Aminoisobutyric Acid
  SITE 6: note = alpha-methyl-2-fluoro-L-phenylalanine
  SITE 10: note = 3-(4-Pyridyl)-L-alanine
  SITE 11: note = alpha-methyl-L-serine
  SITE 13: note = alpha-methyl-leucine
  SITE 16: note = L-ornithine
  SITE 17: note = Lysine is chemically modified through conjugation of the epsilon-amino group of the Lysine side chain with (2-[2-(2-Amino-ethoxy)-ethoxy]-acetyl)-(gamma-Glu)-CO-(CH2) 16-CO2H
  SITE 20: note = 2-Aminoisobutyric Acid
  SITE 24: note = D-amino acid
  SITE 25: note = alpha-methyl-L-tyrosine
  SITE 39: note = Amidated residue

SEQ ID NO: 463 - protein, 39 aa, synthetic construct
  SITE 2: note = 2-Aminoisobutyric Acid
  SITE 6: note = alpha-methyl-2-fluoro-L-phenylalanine
  SITE 10: note = 3-(4-Pyridyl)-L-alanine
  SITE 11: note = alpha-methyl-L-serine
  SITE 13: note = alpha-methyl-leucine
  SITE 16: note = L-ornithine
  SITE 17: note = Lysine is chemically modified through conjugation of the epsilon-amino group of the Lysine side chain with (2-[2-(2-Amino-ethoxy)-ethoxy]-acetyl)-(gamma-Glu)-CO-(CH2) 16-CO2H
  SITE 20: note = 2-Aminoisobutyric Acid
  SITE 24: note = D-amino acid
  SITE 25: note = alpha-methyl-L-tyrosine
  SITE 39: note = Amidated residue
YXQGTXTSDXXIXLDXKAQXTFIEXLIEGGPSSGEPPPE

SEQ ID NO: 464 - protein, 39 aa, synthetic construct; identical to SEQ ID NO: 454
  SITE 2: note = 2-Aminoisobutyric Acid
  SITE 6: note = alpha-methyl-2-fluoro-L-phenylalanine
  SITE 10: note = 3-(4-Pyridyl)-L-alanine
  SITE 11: note = alpha-methyl-L-serine
  SITE 13: note = alpha-methyl-leucine
  SITE 16: note = L-ornithine
  SITE 17: note = Lysine is chemically modified through conjugation of the epsilon-amino group of the Lysine side chain with (2-[2-(2-Amino-ethoxy)-ethoxy]-acetyl)-(gamma-Glu)-CO-(CH2) 16-CO2H
  SITE 20: note = 2-Aminoisobutyric Acid
  SITE 21: note = L-ornithine
  SITE 24: note = D-amino acid

SEQ ID NO: 465 - protein, 39 aa, synthetic construct; identical to SEQ ID NO: 454
  SITE 2: note = 2-Aminoisobutyric Acid
  SITE 6: note = alpha-methyl-2-fluoro-L-phenylalanine
  SITE 10: note = 3-(4-Pyridyl)-L-alanine
  SITE 11: note = alpha-methyl-L-serine
  SITE 13: note = alpha-methyl-leucine
  SITE 16: note = L-ornithine
  SITE 17: note = Lysine is chemically modified through conjugation of the epsilon-amino group of the Lysine side chain with (2-[2-(2-Amino-ethoxy)-ethoxy]-acetyl)-(gamma-Glu)-CO-(CH2) 16-CO2H
  SITE 20: note = 2-Aminoisobutyric Acid
  SITE 21: note = L-ornithine
  SITE 39: note = Amidated residue

SEQ ID NO: 466 - protein, 39 aa, synthetic construct
  SITE 2: note = 2-Aminoisobutyric Acid
  SITE 6: note = alpha-methyl-2-fluoro-L-phenylalanine
  SITE 10: note = 3-(4-Pyridyl)-L-alanine
  SITE 11: note = alpha-methyl-L-serine
  SITE 13: note = alpha-methyl-leucine
  SITE 16: note = L-ornithine
  SITE 17: note = Lysine is chemically modified through conjugation of the epsilon-amino group of the Lysine side chain with (2-[2-(2-Amino-ethoxy)-ethoxy]-acetyl)-(gamma-Glu)-CO-(CH2) 16-CO2H
  SITE 20: note = 2-Aminoisobutyric Acid
  SITE 21: note = L-ornithine
  SITE 24: note = D-amino acid
  SITE 39: note = Amidated residue
YXQGTXTSDXXIXLDXKAQXXFIEYLLEGGPSSGEPPPE

SEQ ID NO: 467 - protein, 39 aa, synthetic construct
  SITE 2: note = 2-Aminoisobutyric Acid
  SITE 6: note = alpha-methyl-2-fluoro-L-phenylalanine
  SITE 10: note = 3-(4-Pyridyl)-L-alanine
  SITE 11: note = alpha-methyl-L-serine
  SITE 13: note = alpha-methyl-leucine
  SITE 16: note = L-ornithine
  SITE 17: note = Lysine is chemically modified through conjugation of the epsilon-amino group of the Lysine side chain with (2-[2-(2-Amino-ethoxy)-ethoxy]-acetyl)-(gamma-Glu)-CO-(CH2) 16-CO2H
  SITE 20: note = 2-Aminoisobutyric Acid
  SITE 21: note = L-ornithine
  SITE 24: note = D-amino acid
  SITE 25: note = alpha-methyl-L-tyrosine
  SITE 39: note = Amidated residue
YXQGTXTSDXXIXLDXKAQXXFIEXLIEGGPSSGEPEPE

SEQ ID NO: 468 - protein, 41 aa, synthetic construct
  SITE 2: note = 2-Aminoisobutyric Acid
  SITE 6: note = alpha-methyl-2-fluoro-L-phenylalanine
  SITE 10: note = 3-(4-Pyridyl)-L-alanine
  SITE 11: note = alpha-methyl-L-serine
  SITE 13: note = alpha-methyl-leucine
  SITE 16: note = L-ornithine
  SITE 17: note = Lysine is chemically modified through conjugation of the epsilon-amino group of the Lysine side chain with (2-[2-(2-Amino-ethoxy)-ethoxy]-acetyl)-(gamma-Glu)-CO-(CH2) 16-CO2H
  SITE 20: note = 2-Aminoisobutyric Acid
  SITE 21: note = L-ornithine
  SITE 24: note = D-amino acid
  SITE 25: note = alpha-methyl-L-tyrosine
  SITE 41: note = Amidated residue
YXQGTXTSDXXIXLDXKAQXXFIEXLIEGGPSSGEPPPEEG

SEQ ID NO: 469 - protein, 41 aa, synthetic construct
  SITE 2: note = 2-Aminoisobutyric Acid
  SITE 6: note = alpha-methyl-2-fluoro-L-phenylalanine
  SITE 10: note = 3-(4-Pyridyl)-L-alanine
  SITE 11: note = alpha-methyl-L-serine
  SITE 13: note = alpha-methyl-leucine
  SITE 16: note = L-ornithine
  SITE 17: note = Lysine is chemically modified through conjugation of the epsilon-amino group of the Lysine side chain with (2-[2-(2-Amino-ethoxy)-ethoxy]-acetyl)-(gamma-Glu)-CO-(CH2) 16-CO2H
  SITE 20: note = 2-Aminoisobutyric Acid
  SITE 21: note = L-ornithine
  SITE 24: note = D-amino acid
  SITE 41: note = Amidated residue
YXQGTXTSDXXIXLDXKAQXXFIEYLIEGGPSSGEPPPSEG

SEQ ID NO: 470 - protein, 39 aa, synthetic construct
  SITE 2: note = 2-Aminoisobutyric Acid
  SITE 6: note = alpha-methyl-2-fluoro-L-phenylalanine
  SITE 10: note = 3-(4-Pyridyl)-L-alanine
  SITE 11: note = alpha-methyl-L-serine
  SITE 17: note = Lysine is chemically modified through conjugation of the epsilon-amino group of the Lysine side chain with (2-[2-(2-Amino-ethoxy)-ethoxy]-acetyl)-(gamma-Glu)-CO-(CH2) 16-CO2H
  SITE 20: note = 2-Aminoisobutyric Acid
  SITE 39: note = Amidated residue
YXQGTXTSDXXILLDKKAQXAFIEYLEEGGPSSGAPPPE

SEQ ID NO: 471 - protein, 39 aa, synthetic construct; identical to SEQ ID NO: 470
  SITE 2: note = 2-Aminoisobutyric Acid
  SITE 6: note = alpha-methyl-2-fluoro-L-phenylalanine
  SITE 10: note = 3-(3-Pyridyl)-L-alanine
  SITE 11: note = alpha-methyl-L-serine
  SITE 17: note = Lysine is chemically modified through conjugation of the epsilon-amino group of the Lysine side chain with (2-[2-(2-Amino-ethoxy)-ethoxy]-acetyl)-(gamma-Glu)-CO-(CH2) 16-CO2H
  SITE 20: note = 2-Aminoisobutyric Acid
  SITE 39: note = Amidated residue

SEQ ID NO: 472 - protein, 39 aa, synthetic construct
  SITE 2: note = 2-Aminoisobutyric Acid
  SITE 6: note = alpha-methyl-2-fluoro-L-phenylalanine
  SITE 10: note = 3-(4-Pyridyl)-L-alanine
  SITE 11: note = alpha-methyl-L-serine
  SITE 13: note = alpha-methyl-leucine
  SITE 16: note = L-ornithine
  SITE 17: note = Lysine is chemically modified through conjugation of the epsilon-amino group of the Lysine side chain with (2-[2-(2-Amino-ethoxy)-ethoxy]-acetyl)-(gamma-Glu)-CO-(CH2) 16-CO2H
  SITE 20: note = 2-Aminoisobutyric Acid
  SITE 24: note = D-amino acid
  SITE 39: note = Amidated residue
HXQGTXTSDXXIXLDXKAQXAFIEYLLEGGPSSGEPPPE

SEQ ID NO: 473 - protein, 39 aa, synthetic construct
  SITE 2: note = 2-Aminoisobutyric Acid
  SITE 6: note = alpha-methyl-2-fluoro-L-phenylalanine
  SITE 11: note = alpha-methyl-L-serine
  SITE 17: note = Lysine is chemically modified through conjugation of the epsilon-amino group of the Lysine side chain with (2-[2-(2-Amino-ethoxy)-ethoxy]-acetyl)-(gamma-Glu)-CO-(CH2) 16-CO2H
  SITE 20: note = 2-Aminoisobutyric Acid
  SITE 39: note = Amidated residue
YXQGTXTSDYXELLDKKAQXAFIEYLEEGGPSSGAPPPE

SEQ ID NO: 474 - protein, 39 aa, synthetic construct
  SITE 2: note = 2-Aminoisobutyric Acid
  SITE 6: note = alpha-methyl-2-fluoro-L-phenylalanine
  SITE 11: note = alpha-methyl-L-serine
  SITE 17: note = Lysine is chemically modified through conjugation of the epsilon-amino group of the Lysine side chain with (2-[2-(2-Amino-ethoxy)-ethoxy]-acetyl)2-(gamma-Glu)-CO-(CH2 )16-CO2H
  SITE 20: note = 2-Aminoisobutyric Acid
  SITE 39: note = Amidated residue
YXQGTXTSDYXILLDKKAQXAFIEYLEEGGPSSGAPPPE

SEQ ID NO: 475 - protein, 39 aa, synthetic construct
  SITE 2: note = 2-Aminoisobutyric Acid
  SITE 6: note = alpha-methyl-2-fluoro-L-phenylalanine
  SITE 11: note = alpha-methyl-L-serine
  SITE 17: note = Lysine is chemically modified through conjugation of the epsilon-amino group of the Lysine side chain with (2-[2-(2-Amino-ethoxy)-ethoxy]-acetyl)2-(gamma-Glu)-CO-(CH2 )16-CO2H
  SITE 20: note = 2-Aminoisobutyric Acid
  SITE 39: note = Amidated residue
YXQGTXTSDYXILLDKKAQXAFIEYLEEGGPSSGEPPPE

SEQ ID NO: 476 - protein, 41 aa, synthetic construct; identical to SEQ ID NO: 404
  SITE 2: note = 2-Aminoisobutyric Acid
  SITE 6: note = alpha-methyl-2-fluoro-L-phenylalanine
  SITE 17: note = Lysine is chemically modified through conjugation of the epsilon-amino group of the Lysine side chain with (gamma-Glu)2-CO-(CH2)16-CO2H
  SITE 20: note = 2-Aminoisobutyric Acid
  SITE 41: note = Amidated residue

SEQ ID NO: 477 - protein, 41 aa, synthetic construct; identical to SEQ ID NO: 405
  SITE 2: note = 2-Aminoisobutyric Acid
  SITE 6: note = alpha-methyl-2-fluoro-L-phenylalanine
  SITE 17: note = Lysine is chemically modified through conjugation of the epsilon-amino group of the Lysine side chain with (gamma-Glu)2-CO-(CH2)16-CO2H
  SITE 20: note = 2-Aminoisobutyric Acid
  SITE 41: note = Amidated residue

SEQ ID NO: 478 - protein, 41 aa, synthetic construct; identical to SEQ ID NO: 435
  SITE 2: note = 2-Aminoisobutyric Acid
  SITE 6: note = alpha-methyl-2-fluoro-L-phenylalanine
  SITE 10: note = 3-(4-Pyridyl)-L-alanine
  SITE 11: note = alpha-methyl-L-serine
  SITE 13: note = alpha-methyl-leucine
  SITE 16: note = L-ornithine
  SITE 17: note = Lysine is chemically modified through conjugation of the epsilon-amino group of the Lysine side chain with (2-[2-(2-Amino-ethoxy)-ethoxy]-acetyl)2-(gamma-Glu)-CO-(CH2 )16-CO2H
  SITE 20: note = 2-Aminoisobutyric Acid
  SITE 21: note = L-ornithine
  SITE 24: note = D-amino acid
  SITE 25: note = alpha-methyl-L-tyrosine
  SITE 41: note = Amidated residue

SEQ ID NO: 479 - protein, 41 aa, synthetic construct
  SITE 2: note = 2-Aminoisobutyric Acid
  SITE 6: note = alpha-methyl-2-fluoro-L-phenylalanine
  SITE 10: note = 3-(4-Pyridyl)-L-alanine
  SITE 11: note = alpha-methyl-L-serine
  SITE 13: note = alpha-methyl-leucine
  SITE 16: note = L-ornithine
  SITE 17: note = Lysine is chemically modified through conjugation of the epsilon-amino group of the Lysine side chain with (gamma-Glu)2-CO-(CH2)16-CO2H
  SITE 20: note = 2-Aminoisobutyric Acid
  SITE 24: note = D-amino acid
  SITE 25: note = alpha-methyl-L-tyrosine
  SITE 41: note = Amidated residue
YXQGTXTSDXXIXLDXKAQXNFIEXLIEGGPSSGEPEPSEG

SEQ ID NO: 480 - protein, 41 aa, synthetic construct
  SITE 2: note = 2-Aminoisobutyric Acid
  SITE 6: note = alpha-methyl-2-fluoro-L-phenylalanine
  SITE 10: note = 3-(4-Pyridyl)-L-alanine
  SITE 11: note = alpha-methyl-L-serine
  SITE 13: note = alpha-methyl-leucine
  SITE 16: note = L-ornithine
  SITE 17: note = Lysine is chemically modified through conjugation of the epsilon-amino group of the Lysine side chain with (gamma-Glu)2-CO-(CH2)16-CO2H
  SITE 20: note = 2-Aminoisobutyric Acid
  SITE 24: note = D-amino acid
  SITE 25: note = alpha-methyl-L-tyrosine
  SITE 41: note = Amidated residue
YXQGTXTSDXXIXLDXKAQXNFIEXLIEGGPSSGEPEPEEG

SEQ ID NO: 481 - protein, 41 aa, synthetic construct
  SITE 2: note = 2-Aminoisobutyric Acid
  SITE 6: note = alpha-methyl-2-fluoro-L-phenylalanine
  SITE 10: note = 3-(4-Pyridyl)-L-alanine
  SITE 13: note = alpha-methyl-leucine
  SITE 16: note = L-ornithine
  SITE 17: note = Lysine is chemically modified through conjugation of the epsilon-amino group of the Lysine side chain with (2-[2-(2-Amino-ethoxy)-ethoxy]-acetyl)-(gamma-Glu)-CO-(CH2) 16-CO2H
  SITE 20: note = alpha-methyl-3-(4-Pyridyl)-L-alanine
  SITE 21: note = L-ornithine
  SITE 24: note = D-amino acid
  SITE 25: note = alpha-methyl-L-tyrosine
  SITE 41: note = Amidated residue
YXQGTXTSDXSIXLDXKAQXXFIEXLIEGGPSSGEPPPEEG

SEQ ID NO: 482 - protein, 41 aa, synthetic construct
  SITE 2: note = 2-Aminoisobutyric Acid
  SITE 6: note = alpha-methyl-2-fluoro-L-phenylalanine
  SITE 10: note = 3-(4-Pyridyl)-L-alanine
  SITE 11: note = alpha-methyl-L-serine
  SITE 13: note = alpha-methyl-leucine
  SITE 16: note = L-ornithine
  SITE 17: note = Lysine is chemically modified through conjugation of the epsilon-amino group of the Lysine side chain with (2-[2-(2-Amino-ethoxy)-ethoxy]-acetyl)-(gamma-Glu)-CO-(CH2) 16-CO2H
  SITE 20: note = 2-Aminoisobutyric Acid
  SITE 21: note = L-ornithine
  SITE 41: note = Amidated residue
YXQGTXTSDXXIXLDXKAQXXFIEYLIEGGPSSGEPPPEEG

SEQ ID NO: 483 - protein, 41 aa, synthetic construct
  SITE 2: note = 2-Aminoisobutyric Acid
  SITE 6: note = alpha-methyl-2-fluoro-L-phenylalanine
  SITE 10: note = 3-(4-Pyridyl)-L-alanine
  SITE 13: note = alpha-methyl-leucine
  SITE 16: note = L-ornithine
  SITE 17: note = Lysine is chemically modified through conjugation of the epsilon-amino group of the Lysine side chain with (2-[2-(2-Amino-ethoxy)-ethoxy]-acetyl)-(gamma-Glu)-CO-(CH2) 16-CO2H
  SITE 20: note = 2-Aminoisobutyric Acid
  SITE 21: note = L-ornithine
  SITE 41: note = Amidated residue
YXQGTXTSDXSIXLDXKAQXXFIEYLIEGGPSSGEPPPEEG

SEQ ID NO: 484 - protein, 39 aa, synthetic construct
  SITE 2: note = 2-Aminoisobutyric Acid
  SITE 6: note = alpha-methyl-2-fluoro-L-phenylalanine
  SITE 10: note = 3-(4-Pyridyl)-L-alanine
  SITE 11: note = alpha-methyl-L-serine
  SITE 13: note = alpha-methyl-leucine
  SITE 16: note = L-ornithine
  SITE 17: note = Lysine is chemically modified through conjugation of the epsilon-amino group of the Lysine side chain with (2-[2-(2-Amino-ethoxy)-ethoxy]-acetyl)-(gamma-Glu)-CO-(CH2) 16-CO2H
  SITE 20: note = alpha-methyl-3-(4-Pyridyl)-L-alanine
  SITE 24: note = D-amino acid
  SITE 39: note = Amidated residue
HXQGTXTSDXXIXLDXKAQXNFIEYLLEGGPSSGEPPPE

SEQ ID NO: 485 - protein, 39 aa, synthetic construct
  SITE 2: note = 2-Aminoisobutyric Acid
  SITE 6: note = alpha-methyl-2-fluoro-L-phenylalanine
  SITE 10: note = 3-(4-Pyridyl)-L-alanine
  SITE 11: note = alpha-methyl-L-serine
  SITE 13: note = alpha-methyl-leucine
  SITE 16: note = L-ornithine
  SITE 17: note = Lysine is chemically modified through conjugation of the epsilon-amino group of the Lysine side chain with (2-[2-(2-Amino-ethoxy)-ethoxy]-acetyl)-(gamma-Glu)-CO-(CH2) 16-CO2H
  SITE 20: note = 2-Aminoisobutyric Acid
  SITE 24: note = D-amino acid
  SITE 39: note = Amidated residue
HXQGTXTSDXXIXLDXKAQXAFIEYLLEGGPSSGEPEPE

SEQ ID NO: 486 - protein, 41 aa, synthetic construct; identical to SEQ ID NO: 407
  SITE 2: note = 2-Aminoisobutyric Acid
  SITE 6: note = alpha-methyl-2-fluoro-L-phenylalanine
  SITE 10: note = 3-(4-Pyridyl)-L-alanine
  SITE 11: note = alpha-methyl-L-serine
  SITE 13: note = alpha-methyl-leucine
  SITE 16: note = L-ornithine
  SITE 17: note = Lysine is chemically modified through conjugation of the epsilon-amino group of the Lysine side chain with (gamma-Glu)2-CO-(CH2)16-CO2H
  SITE 20: note = 2-Aminoisobutyric Acid
  SITE 21: note = L-ornithine
  SITE 24: note = D-amino acid
  SITE 25: note = alpha-methyl-L-tyrosine
  SITE 41: note = Amidated residue

SEQ ID NO: 487 - protein, 41 aa, synthetic construct
  SITE 2: note = 2-Aminoisobutyric Acid
  SITE 6: note = alpha-methyl-2-fluoro-L-phenylalanine
  SITE 10: note = 3-(4-Pyridyl)-L-alanine
  SITE 11: note = alpha-methyl-L-serine
  SITE 13: note = alpha-methyl-leucine
  SITE 16: note = L-ornithine
  SITE 17: note = Lysine is chemically modified through conjugation of the epsilon-amino group of the Lysine side chain with (2-[2-(2-Amino-ethoxy)-ethoxy]-acetyl)-(gamma-Glu)-CO-(CH2) 16-CO2H
  SITE 20: note = 2-Aminoisobutyric Acid
  SITE 21: note = L-ornithine
  SITE 24: note = D-amino acid
  SITE 25: note = alpha-methyl-L-tyrosine
  SITE 41: note = Amidated residue
YXQGTXTSDXXIXLDXKAQXXFIEXLIEGGPSSGEPEPSEG

SEQ ID NO: 488 - protein, 41 aa, synthetic construct
  SITE 2: note = 2-Aminoisobutyric Acid
  SITE 6: note = alpha-methyl-2-fluoro-L-phenylalanine
  SITE 10: note = 3-(4-Pyridyl)-L-alanine
  SITE 11: note = alpha-methyl-L-serine
  SITE 13: note = alpha-methyl-leucine
  SITE 16: note = L-ornithine
  SITE 17: note = Lysine is chemically modified through conjugation of the epsilon-amino group of the Lysine side chain with (2-[2-(2-Amino-ethoxy)-ethoxy]-acetyl)-(gamma-Glu)-CO-(CH2) 16-CO2H
  SITE 20: note = 2-Aminoisobutyric Acid
  SITE 41: note = Amidated residue
YXQGTXTSDXXIXLDXKAQXNFIEYLIEGGPSSGEPPPEEG

SEQ ID NO: 489 - protein, 41 aa, synthetic construct
  SITE 2: note = 2-Aminoisobutyric Acid
  SITE 6: note = alpha-methyl-2-fluoro-L-phenylalanine
  SITE 10: note = 3-(4-Pyridyl)-L-alanine
  SITE 11: note = alpha-methyl-L-serine
  SITE 13: note = alpha-methyl-leucine
  SITE 16: note = L-ornithine
  SITE 17: note = Lysine is chemically modified through conjugation of the epsilon-amino group of the Lysine side chain with (2-[2-(2-Amino-ethoxy)-ethoxy]-acetyl)-(gamma-Glu)-CO-(CH2) 16-CO2H
  SITE 20: note = 2-Aminoisobutyric Acid
  SITE 41: note = Amidated residue
YXQGTXTSDXXIXLDXKAQXNFIEYLIEGGPSSGEPPPEGE

SEQ ID NO: 490 - protein, 41 aa, synthetic construct
  SITE 2: note = 2-Aminoisobutyric Acid
  SITE 6: note = alpha-methyl-2-fluoro-L-phenylalanine
  SITE 10: note = 3-(4-Pyridyl)-L-alanine
  SITE 11: note = alpha-methyl-L-serine
  SITE 13: note = alpha-methyl-leucine
  SITE 16: note = L-ornithine
  SITE 17: note = Lysine is chemically modified through conjugation of the epsilon-amino group of the Lysine side chain with (2-[2-(2-Amino-ethoxy)-ethoxy]-acetyl)-(gamma-Glu)-CO-(CH2) 16-CO2H
  SITE 20: note = 2-Aminoisobutyric Acid
  SITE 21: note = L-ornithine
  SITE 41: note = Amidated residue
YXQGTXTSDXXIXLDXKAQXXFIEYLIEAGPSSGEPPPEEG

SEQ ID NO: 491 - protein, 41 aa, synthetic construct; identical to SEQ ID NO: 490
  SITE 2: note = 2-Aminoisobutyric Acid
  SITE 6: note = alpha-methyl-2-fluoro-L-phenylalanine
  SITE 10: note = 3-(4-Pyridyl)-L-alanine
  SITE 11: note = alpha-methyl-L-serine
  SITE 13: note = alpha-methyl-leucine
  SITE 16: note = L-ornithine
  SITE 17: note = Lysine is chemically modified through conjugation of the epsilon-amino group of the Lysine side chain with (2-[2-(2-Amino-ethoxy)-ethoxy]-acetyl)-(gamma-Glu)2-CO-(CH2 )16-CO2H
  SITE 20: note = 2-Aminoisobutyric Acid
  SITE 21: note = L-ornithine
  SITE 41: note = Amidated residue

SEQ ID NO: 492 - protein, 39 aa, synthetic construct
  SITE 2: note = 2-Aminoisobutyric Acid
  SITE 6: note = alpha-methyl-2-fluoro-L-phenylalanine
  SITE 10: note = 3-(4-Pyridyl)-L-alanine
  SITE 13: note = alpha-methyl-leucine
  SITE 16: note = L-ornithine
  SITE 17: note = Lysine is chemically modified through conjugation of the epsilon-amino group of the Lysine side chain with (2-[2-(2-Amino-ethoxy)-ethoxy]-acetyl)-(gamma-Glu)-CO-(CH2) 16-CO2H
  SITE 20: note = 2-Aminoisobutyric Acid
  SITE 39: note = Amidated residue
YXQGTXTSDXSIXLDXKAQXAFIEYLEEGGPSSGEPPPS

SEQ ID NO: 493 - protein, 39 aa, synthetic construct
  SITE 2: note = 2-Aminoisobutyric Acid
  SITE 6: note = alpha-methyl-2-fluoro-L-phenylalanine
  SITE 10: note = 3-(4-Pyridyl)-L-alanine
  SITE 13: note = alpha-methyl-leucine
  SITE 17: note = Lysine is chemically modified through conjugation of the epsilon-amino group of the Lysine side chain with (2-[2-(2-Amino-ethoxy)-ethoxy]-acetyl)-(gamma-Glu)-CO-(CH2) 16-CO2H
  SITE 20: note = 2-Aminoisobutyric Acid
  SITE 39: note = Amidated residue
YXQGTXTSDXSIXLDKKAQXAFIEYLEEGGPSSGEPPPE

SEQ ID NO: 494 - protein, 41 aa, synthetic construct
  SITE 2: note = 2-Aminoisobutyric Acid
  SITE 6: note = alpha-methyl-2-fluoro-L-phenylalanine
  SITE 10: note = 3-(4-Pyridyl)-L-alanine
  SITE 13: note = alpha-methyl-leucine
  SITE 17: note = Lysine is chemically modified through conjugation of the epsilon-amino group of the Lysine side chain with (2-[2-(2-Amino-ethoxy)-ethoxy]-acetyl)-(gamma-Glu)-CO-(CH2) 16-CO2H
  SITE 20: note = 2-Aminoisobutyric Acid
  SITE 41: note = Amidated residue
YXQGTXTSDXSIXLDKKAQXAFIEYLEEGGPSSGEPPPSEG

SEQ ID NO: 495 - protein, 41 aa, synthetic construct
  SITE 2: note = 2-Aminoisobutyric Acid
  SITE 6: note = alpha-methyl-2-fluoro-L-phenylalanine
  SITE 10: note = 3-(4-Pyridyl)-L-alanine
  SITE 13: note = alpha-methyl-leucine
  SITE 16: note = L-ornithine
  SITE 17: note = Lysine is chemically modified through conjugation of the epsilon-amino group of the Lysine side chain with (2-[2-(2-Amino-ethoxy)-ethoxy]-acetyl)-(gamma-Glu)-CO-(CH2) 16-CO2H
  SITE 20: note = 2-Aminoisobutyric Acid
  SITE 21: note = L-ornithine
  SITE 41: note = Amidated residue
YXQGTXTSDXSIXLDXKAQXXFIEYLIEGGPSSGEPPPSEG

SEQ ID NO: 496 - protein, 41 aa, synthetic construct; identical to SEQ ID NO: 407
  SITE 2: note = 2-Aminoisobutyric Acid
  SITE 6: note = alpha-methyl-2-fluoro-L-phenylalanine
  SITE 10: note = 3-(4-Pyridyl)-L-alanine
  SITE 11: note = alpha-methyl-L-serine
  SITE 13: note = alpha-methyl-leucine
  SITE 16: note = L-ornithine
  SITE 17: note = Lysine is chemically modified through conjugation of the epsilon-amino group of the Lysine side chain with (2-[2-(2-Amino-ethoxy)-ethoxy]-acetyl)2-(gamma-Glu)-CO-(CH2 )16-CO2H
  SITE 20: note = 2-Aminoisobutyric Acid
  SITE 21: note = L-ornithine
  SITE 24: note = D-amino acid
  SITE 25: note = alpha-methyl-L-tyrosine
  SITE 41: note = Amidated residue

SEQ ID NO: 497 - protein, 41 aa, synthetic construct; identical to SEQ ID NO: 469
  SITE 2: note = 2-Aminoisobutyric Acid
  SITE 6: note = alpha-methyl-2-fluoro-L-phenylalanine
  SITE 10: note = 3-(4-Pyridyl)-L-alanine
  SITE 11: note = alpha-methyl-L-serine
  SITE 13: note = alpha-methyl-leucine
  SITE 16: note = L-ornithine
  SITE 17: note = Lysine is chemically modified through conjugation of the epsilon-amino group of the Lysine side chain with (2-[2-(2-Amino-ethoxy)-ethoxy]-acetyl)2-(gamma-Glu)-CO-(CH2 )16-CO2H
  SITE 20: note = 2-Aminoisobutyric Acid
  SITE 21: note = L-ornithine
  SITE 41: note = Amidated residue

SEQ ID NO: 498 - protein, 41 aa, synthetic construct
  SITE 2: note = 2-Aminoisobutyric Acid
  SITE 6: note = alpha-methyl-2-fluoro-L-phenylalanine
  SITE 10: note = 3-(4-Pyridyl)-L-alanine
  SITE 11: note = alpha-methyl-L-serine
  SITE 13: note = alpha-methyl-leucine
  SITE 16: note = L-ornithine
  SITE 17: note = Lysine is chemically modified through conjugation of the epsilon-amino group of the Lysine side chain with (2-[2-(2-Amino-ethoxy)-ethoxy]-acetyl)2-(gamma-Glu)-CO-(CH2 )16-CO2H
  SITE 20: note = 2-Aminoisobutyric Acid
  SITE 21: note = L-ornithine
  SITE 41: note = Amidated residue
YXQGTXTSDXXIXLDXKAQXXFIEYLIEGGPSSGAPEPSEG

SEQ ID NO: 499 - protein, 41 aa, synthetic construct; identical to SEQ ID NO: 494
  SITE 2: note = 2-Aminoisobutyric Acid
  SITE 6: note = alpha-methyl-2-fluoro-L-phenylalanine
  SITE 10: note = 3-(4-Pyridyl)-L-alanine
  SITE 13: note = alpha-methyl-leucine
  SITE 17: note = Lysine is chemically modified through conjugation of the epsilon-amino group of the Lysine side chain with (2-[2-(2-Amino-ethoxy)-ethoxy]-acetyl)-(gamma-Glu)-CO-(CH2) 16-CO2H
  SITE 20: note = 2-Aminoisobutyric Acid
  SITE 41: note = Amidated residue

SEQ ID NO: 500 - protein, 41 aa, synthetic construct
  SITE 2: note = 2-Aminoisobutyric Acid
  SITE 6: note = alpha-methyl-2-fluoro-L-phenylalanine
  SITE 10: note = 3-(4-Pyridyl)-L-alanine
  SITE 13: note = alpha-methyl-leucine
  SITE 16: note = L-ornithine
  SITE 17: note = Lysine is chemically modified through conjugation of the epsilon-amino group of the Lysine side chain with (2-[2-(2-Amino-ethoxy)-ethoxy]-acetyl)-(gamma-Glu)-CO-(CH2) 16-CO2H
  SITE 20: note = 2-Aminoisobutyric Acid
  SITE 21: note = L-ornithine
  SITE 41: note = Amidated residue
YXQGTXTSDXSIXLDXKAQXXFIEYLLEGGPSSGEPPPEEG

SEQ ID NO: 501 - protein, 39 aa, synthetic construct; identical to SEQ ID NO: 451
  SITE 2: note = 2-Aminoisobutyric Acid
  SITE 6: note = alpha-methyl-2-fluoro-L-phenylalanine
  SITE 10: note = 4-nitro-L-phenylalanine
  SITE 13: note = alpha-methyl-leucine
  SITE 17: note = Lysine is chemically modified through conjugation of the epsilon-amino group of the Lysine side chain with (2-[2-(2-Amino-ethoxy)-ethoxy]-acetyl)-(gamma-Glu)-CO-(CH2) 16-CO2H
  SITE 20: note = 2-Aminoisobutyric Acid
  SITE 39: note = Amidated residue

SEQ ID NO: 502 - protein, 41 aa, synthetic construct
  SITE 2: note = 2-Aminoisobutyric Acid
  SITE 12: note = L-ornithine
  SITE 13: note = alpha-methyl-leucine
  SITE 17: note = Lysine is chemically modified through conjugation of the epsilon-amino group of the Lysine side chain with (2-[2-(2-Amino-ethoxy)-ethoxy]-acetyl)-(gamma-Glu)-CO-(CH2) 16-CO2H
  SITE 20: note = 2-Aminoisobutyric Acid
  SITE 25: note = 3-(4-Pyridyl)-L-alanine
  SITE 41: note = Amidated residue
YXQGTFTSDFSXXLDKKAQXAFIEXLLEGGPSSGAPPPGGS

SEQ ID NO: 503 - protein, 41 aa, synthetic construct
  SITE 2: note = 2-Aminoisobutyric Acid
  SITE 10: note = 3-(4-Pyridyl)-L-alanine
  SITE 12: note = L-ornithine
  SITE 13: note = alpha-methyl-leucine
  SITE 17: note = Lysine is chemically modified through conjugation of the epsilon-amino group of the Lysine side chain with (2-[2-(2-Amino-ethoxy)-ethoxy]-acetyl)-(gamma-Glu)-CO-(CH2) 16-CO2H
  SITE 20: note = alpha-methyl-3-(4-Pyridyl)-L-alanine
  SITE 25: note = alpha-methyl-L-tyrosine
  SITE 41: note = Amidated residue
YXQGTFTSDXSXXLDKKAQXAFIEXLIEGGPSSGAPPPSGS

SEQ ID NO: 504 - protein, 41 aa, synthetic construct
  SITE 2: note = 2-Aminoisobutyric Acid
  SITE 10: note = 3-(4-Pyridyl)-L-alanine
  SITE 13: note = alpha-methyl-leucine
  SITE 17: note = Lysine is chemically modified through conjugation of the epsilon-amino group of the Lysine side chain with (2-[2-(2-Amino-ethoxy)-ethoxy]-acetyl)-(gamma-Glu)-CO-(CH2) 16-CO2H
  SITE 20: note = alpha-methyl-3-(4-Pyridyl)-L-alanine
  SITE 25: note = alpha-methyl-3-(4-Pyridyl)-L-alanine
  SITE 29: note = 2-Aminoisobutyric Acid
  SITE 41: note = Amidated residue
YXQGTFTSDXSQXLDKKAQXAFIEXLIEXGPSSGAPPPSGS

SEQ ID NO: 505 - protein, 41 aa, synthetic construct
  SITE 2: note = 2-Aminoisobutyric Acid
  SITE 6: note = alpha-methyl-2-fluoro-L-phenylalanine
  SITE 10: note = 3-(4-Pyridyl)-L-alanine
  SITE 16: note = L-ornithine
  SITE 17: note = Lysine is chemically modified through conjugation of the epsilon-amino group of the Lysine side chain with (2-[2-(2-Amino-ethoxy)-ethoxy]-acetyl)-(gamma-Glu)-CO-(CH2) 16-CO2H
  SITE 20: note = 3-(4-Pyridyl)-L-alanine
  SITE 21: note = L-ornithine
  SITE 24: note = D-amino acid
  SITE 25: note = alpha-methyl-L-tyrosine
YXQGTXTSDXSILLDXKAQXXFIEXLIEGGPSSGEPPPEGT

SEQ ID NO: 506 - protein, 41 aa, synthetic construct
  SITE 2: note = 2-Aminoisobutyric Acid
  SITE 6: note = alpha-methyl-2-fluoro-L-phenylalanine
  SITE 10: note = 3-(4-Pyridyl)-L-alanine
  SITE 13: note = alpha-methyl-leucine
  SITE 16: note = L-ornithine
  SITE 17: note = Lysine is chemically modified through conjugation of the epsilon-amino group of the Lysine side chain with (2-[2-(2-Amino-ethoxy)-ethoxy]-acetyl)-(gamma-Glu)-CO-(CH2) 16-CO2H
  SITE 20: note = 3-(4-Pyridyl)-L-alanine
  SITE 21: note = L-ornithine
  SITE 24: note = D-amino acid
  SITE 41: note = Amidated residue
YXQGTXTSDXSIXLDXKAQXXFIEYLIEGGPSSGEPPPEGT

SEQ ID NO: 507 - protein, 42 aa, synthetic construct
  SITE 2: note = 2-Aminoisobutyric Acid
  SITE 6: note = alpha-methyl-2-fluoro-L-phenylalanine
  SITE 10: note = 3-(4-Pyridyl)-L-alanine
  SITE 11: note = alpha-methyl-L-serine
  SITE 13: note = alpha-methyl-leucine
  SITE 16: note = L-ornithine
  SITE 17: note = Lysine is chemically modified through conjugation of the epsilon-amino group of the Lysine side chain with (2-[2-(2-Amino-ethoxy)-ethoxy]-acetyl)-(gamma-Glu)-CO-(CH2) 16-CO2H
  SITE 20: note = 2-Aminoisobutyric Acid
  SITE 21: note = L-ornithine
  SITE 24: note = D-amino acid
  SITE 42: note = Amidated residue
YXQGTXTSDXXIXLDXKAQXXFIEYLIEGGPSSGEPPPSGTE

SEQ ID NO: 508 - protein, 41 aa, synthetic construct
  SITE 2: note = 2-Aminoisobutyric Acid
  SITE 6: note = alpha-methyl-2-fluoro-L-phenylalanine
  SITE 10: note = 3-(4-Pyridyl)-L-alanine
  SITE 11: note = alpha-methyl-L-serine
  SITE 13: note = alpha-methyl-leucine
  SITE 16: note = L-ornithine
  SITE 17: note = Lysine is chemically modified through conjugation of the epsilon-amino group of the Lysine side chain with (2-[2-(2-Amino-ethoxy)-ethoxy]-acetyl)-(gamma-Glu)-CO-(CH2) 16-CO2H
  SITE 20: note = 2-Aminoisobutyric Acid
  SITE 21: note = L-ornithine
  SITE 24: note = D-amino acid
YXQGTXTSDXXIXLDXKAQXXFIEYLIEGGPSSGEPPPSGT

SEQ ID NO: 509 - protein, 42 aa, synthetic construct
  SITE 2: note = 2-Aminoisobutyric Acid
  SITE 6: note = alpha-methyl-2-fluoro-L-phenylalanine
  SITE 10: note = 3-(4-Pyridyl)-L-alanine
  SITE 11: note = alpha-methyl-L-serine
  SITE 13: note = alpha-methyl-leucine
  SITE 16: note = L-ornithine
  SITE 17: note = Lysine is chemically modified through conjugation of the epsilon-amino group of the Lysine side chain with (gamma-Glu)2-CO-(CH2)16-CO2H
  SITE 20: note = 2-Aminoisobutyric Acid
  SITE 21: note = L-ornithine
  SITE 24: note = D-amino acid
  SITE 25: note = alpha-methyl-L-tyrosine
  SITE 42: note = Amidated residue
YXQGTXTSDXXIXLDXKAQXXFIEXLQEGGPSSGEPPPEGTE

SEQ ID NO: 510 - protein, 42 aa, synthetic construct
  SITE 2: note = 2-Aminoisobutyric Acid
  SITE 6: note = alpha-methyl-2-fluoro-L-phenylalanine
  SITE 10: note = 3-(4-Pyridyl)-L-alanine
  SITE 11: note = alpha-methyl-L-serine
  SITE 13: note = alpha-methyl-leucine
  SITE 16: note = L-ornithine
  SITE 17: note = Lysine is chemically modified through conjugation of the epsilon-amino group of the Lysine side chain with (gamma-Glu)2-CO-(CH2)16-CO2H
  SITE 20: note = 2-Aminoisobutyric Acid
  SITE 21: note = L-ornithine
  SITE 24: note = D-amino acid
  SITE 25: note = alpha-methyl-L-tyrosine
  SITE 42: note = Amidated residue
YXQGTXTSDXXIXLDXKAQXXFIEXLQEGGPSSGEPPPSGTE

SEQ ID NO: 511 - protein, 41 aa, synthetic construct
  SITE 2: note = 2-Aminoisobutyric Acid
  SITE 6: note = alpha-methyl-2-fluoro-L-phenylalanine
  SITE 10: note = 3-(4-Pyridyl)-L-alanine
  SITE 13: note = alpha-methyl-leucine
  SITE 16: note = L-ornithine
  SITE 17: note = Lysine is chemically modified through conjugation of the epsilon-amino group of the Lysine side chain with (2-[2-(2-Amino-ethoxy)-ethoxy]-acetyl)-(gamma-Glu)-CO-(CH2) 16-CO2H
  SITE 20: note = 3-(4-Pyridyl)-L-alanine
  SITE 21: note = L-ornithine
  SITE 25: note = alpha-methyl-L-tyrosine
  SITE 41: note = Amidated residue
YXQGTXTSDXSIXLDXKAQXXFIEXLIEGGPSSGEPPPEGT

SEQ ID NO: 512 - protein, 41 aa, synthetic construct
  SITE 2: note = 2-Aminoisobutyric Acid
  SITE 6: note = alpha-methyl-2-fluoro-L-phenylalanine
  SITE 10: note = 3-(4-Pyridyl)-L-alanine
  SITE 13: note = alpha-methyl-leucine
  SITE 16: note = L-ornithine
  SITE 17: note = Lysine is chemically modified through conjugation of the epsilon-amino group of the Lysine side chain with (2-[2-(2-Amino-ethoxy)-ethoxy]-acetyl)-(gamma-Glu)-CO-(CH2) 16-CO2H
  SITE 20: note = 3-(4-Pyridyl)-L-alanine
  SITE 21: note = L-ornithine
  SITE 24: note = D-amino acid
  SITE 25: note = alpha-methyl-L-tyrosine
  SITE 41: note = Amidated residue
YXQGTXTSDXSIXLDXKAQXXFIEXLEEGGPSSGEPPPEGT

SEQ ID NO: 513 - protein, 41 aa, synthetic construct; identical to SEQ ID NO: 511
  SITE 2: note = 2-Aminoisobutyric Acid
  SITE 6: note = alpha-methyl-L-phenylalanine
  SITE 10: note = 3-(4-Pyridyl)-L-alanine
  SITE 13: note = alpha-methyl-leucine
  SITE 16: note = L-ornithine
  SITE 17: note = Lysine is chemically modified through conjugation of the epsilon-amino group of the Lysine side chain with (2-[2-(2-Amino-ethoxy)-ethoxy]-acetyl)-(gamma-Glu)-CO-(CH2) 16-CO2H
  SITE 20: note = 3-(4-Pyridyl)-L-alanine
  SITE 21: note = L-ornithine
  SITE 24: note = D-amino acid
  SITE 25: note = alpha-methyl-L-tyrosine
  SITE 41: note = Amidated residue

SEQ ID NO: 514 - protein, 41 aa, synthetic construct
  SITE 2: note = 2-Aminoisobutyric Acid
  SITE 6: note = alpha-methyl-L-phenylalanine
  SITE 10: note = 3-(4-Pyridyl)-L-alanine
  SITE 13: note = alpha-methyl-leucine
  SITE 16: note = L-ornithine
  SITE 17: note = Lysine is chemically modified through conjugation of the epsilon-amino group of the Lysine side chain with (2-[2-(2-Amino-ethoxy)-ethoxy]-acetyl)-(gamma-Glu)-CO-(CH2) 16-CO2H
  SITE 20: note = 3-(4-Pyridyl)-L-alanine
  SITE 21: note = L-ornithine
  SITE 24: note = D-amino acid
  SITE 25: note = alpha-methyl-L-tyrosine
  SITE 41: note = Amidated residue
YXQGTXTSDXSIXLDXKAQXXFIEXLIEGGPSSGAPPPEGT

SEQ ID NO: 515 - protein, 42 aa, synthetic construct
  SITE 2: note = 2-Aminoisobutyric Acid
  SITE 6: note = alpha-methyl-2-fluoro-L-phenylalanine
  SITE 10: note = 3-(4-Pyridyl)-L-alanine
  SITE 17: note = Lysine is chemically modified through conjugation of the epsilon-amino group of the Lysine side chain with (gamma-Glu)2-CO-(CH2)16-CO2H
  SITE 20: note = 2-Aminoisobutyric Acid
  SITE 42: note = Amidated residue
YXQGTXTSDXSILLDKKAQXAFIEYLEEGGPSSGAPPPSGTE

SEQ ID NO: 516 - protein, 43 aa, synthetic construct
  SITE 2: note = 2-Aminoisobutyric Acid
  SITE 6: note = alpha-methyl-2-fluoro-L-phenylalanine
  SITE 10: note = 3-(4-Pyridyl)-L-alanine
  SITE 17: note = Lysine is chemically modified through conjugation of the epsilon-amino group of the Lysine side chain with (gamma-Glu)2-CO-(CH2)16-CO2H
  SITE 20: note = 2-Aminoisobutyric Acid
  SITE 43: note = Amidated residue
YXQGTXTSDXSILLDKKAQXAFIEYLEEGGPSSGAPPPSGTGE

SEQ ID NO: 517 - protein, 42 aa, synthetic construct; identical to SEQ ID NO: 515
  SITE 2: note = 2-Aminoisobutyric Acid
  SITE 6: note = alpha-methyl-2-fluoro-L-phenylalanine
  SITE 10: note = 3-(4-Pyridyl)-L-alanine
  SITE 17: note = Lysine is chemically modified through conjugation of the epsilon-amino group of the Lysine side chain with (gamma-Glu)2-CO-(CH2)16-CO2H
  SITE 20: note = 2-Aminoisobutyric Acid

SEQ ID NO: 518 - protein, 43 aa, synthetic construct; identical to SEQ ID NO: 516
  SITE 2: note = 2-Aminoisobutyric Acid
  SITE 6: note = alpha-methyl-2-fluoro-L-phenylalanine
  SITE 10: note = 3-(4-Pyridyl)-L-alanine
  SITE 17: note = Lysine is chemically modified through conjugation of the epsilon-amino group of the Lysine side chain with (gamma-Glu)2-CO-(CH2)16-CO2H
  SITE 20: note = 2-Aminoisobutyric Acid

SEQ ID NO: 519 - protein, 42 aa, synthetic construct
  SITE 2: note = 2-Aminoisobutyric Acid
  SITE 6: note = alpha-methyl-2-fluoro-L-phenylalanine
  SITE 10: note = 3-(4-Pyridyl)-L-alanine
  SITE 16: note = L-ornithine
  SITE 17: note = Lysine is chemically modified through conjugation of the epsilon-amino group of the Lysine side chain with (gamma-Glu)2-CO-(CH2)16-CO2H
  SITE 20: note = 2-Aminoisobutyric Acid
  SITE 42: note = Amidated residue
YXQGTXTSDXSILLDXKAQXAFIEYLEEGGPSSGAPPPSGTE

SEQ ID NO: 520 - protein, 43 aa, synthetic construct
  SITE 2: note = 2-Aminoisobutyric Acid
  SITE 6: note = alpha-methyl-2-fluoro-L-phenylalanine
  SITE 10: note = 3-(4-Pyridyl)-L-alanine
  SITE 16: note = L-ornithine
  SITE 17: note = Lysine is chemically modified through conjugation of the epsilon-amino group of the Lysine side chain with (gamma-Glu)2-CO-(CH2)16-CO2H
  SITE 20: note = 2-Aminoisobutyric Acid
  SITE 43: note = Amidated residue
YXQGTXTSDXSILLDXKAQXAFIEYLEEGGPSSGAPPPSGTGE

SEQ ID NO: 521 - protein, 42 aa, synthetic construct; identical to SEQ ID NO: 519
  SITE 2: note = 2-Aminoisobutyric Acid
  SITE 6: note = alpha-methyl-2-fluoro-L-phenylalanine
  SITE 10: note = 3-(4-Pyridyl)-L-alanine
  SITE 16: note = L-ornithine
  SITE 17: note = Lysine is chemically modified through conjugation of the epsilon-amino group of the Lysine side chain with (gamma-Glu)2-CO-(CH2)16-CO2H
  SITE 20: note = 2-Aminoisobutyric Acid

SEQ ID NO: 522 - protein, 43 aa, synthetic construct; identical to SEQ ID NO: 520
  SITE 2: note = 2-Aminoisobutyric Acid
  SITE 6: note = alpha-methyl-2-fluoro-L-phenylalanine
  SITE 10: note = 3-(4-Pyridyl)-L-alanine
  SITE 16: note = L-ornithine
  SITE 17: note = Lysine is chemically modified through conjugation of the epsilon-amino group of the Lysine side chain with (gamma-Glu)2-CO-(CH2)16-CO2H
  SITE 20: note = 2-Aminoisobutyric Acid

SEQ ID NO: 523 - protein, 42 aa, synthetic construct
  SITE 2: note = 2-Aminoisobutyric Acid
  SITE 6: note = alpha-methyl-2-fluoro-L-phenylalanine
  SITE 10: note = 3-(4-Pyridyl)-L-alanine
  SITE 11: note = alpha-methyl-L-serine
  SITE 13: note = alpha-methyl-leucine
  SITE 16: note = L-ornithine
  SITE 17: note = Lysine is chemically modified through conjugation of the epsilon-amino group of the Lysine side chain with (gamma-Glu)2-CO-(CH2)16-CO2H
  SITE 20: note = 2-Aminoisobutyric Acid
  SITE 21: note = L-ornithine
  SITE 24: note = D-amino acid
  SITE 25: note = alpha-methyl-L-tyrosine
  SITE 42: note = Amidated residue
YXQGTXTSDXXIXLDXKAQXXFIEXLSEGGPSSGEPPPSGTE

SEQ ID NO: 524 - protein, 43 aa, synthetic construct
  SITE 2: note = 2-Aminoisobutyric Acid
  SITE 6: note = alpha-methyl-2-fluoro-L-phenylalanine
  SITE 10: note = 3-(4-Pyridyl)-L-alanine
  SITE 11: note = alpha-methyl-L-serine
  SITE 13: note = alpha-methyl-leucine
  SITE 16: note = L-ornithine
  SITE 17: note = Lysine is chemically modified through conjugation of the epsilon-amino group of the Lysine side chain with (gamma-Glu)2-CO-(CH2)16-CO2H
  SITE 20: note = 2-Aminoisobutyric Acid
  SITE 21: note = L-ornithine
  SITE 24: note = D-amino acid
  SITE 25: note = alpha-methyl-L-tyrosine
  SITE 43: note = Amidated residue
YXQGTXTSDXXIXLDXKAQXXFIEXLSEGGPSSGEPPPSGTGE

SEQ ID NO: 525 - protein, 42 aa, synthetic construct; identical to SEQ ID NO: 523
  SITE 2: note = 2-Aminoisobutyric Acid
  SITE 6: note = alpha-methyl-2-fluoro-L-phenylalanine
  SITE 10: note = 3-(4-Pyridyl)-L-alanine
  SITE 11: note = alpha-methyl-L-serine
  SITE 13: note = alpha-methyl-leucine
  SITE 16: note = L-ornithine
  SITE 17: note = Lysine is chemically modified through conjugation of the epsilon-amino group of the Lysine side chain with (gamma-Glu)2-CO-(CH2)16-CO2H
  SITE 20: note = 2-Aminoisobutyric Acid
  SITE 21: note = L-ornithine
  SITE 24: note = D-amino acid
  SITE 25: note = alpha-methyl-L-tyrosine

SEQ ID NO: 526 - protein, 43 aa, synthetic construct; identical to SEQ ID NO: 524
  SITE 2: note = 2-Aminoisobutyric Acid
  SITE 6: note = alpha-methyl-2-fluoro-L-phenylalanine
  SITE 10: note = 3-(4-Pyridyl)-L-alanine
  SITE 11: note = alpha-methyl-L-serine
  SITE 13: note = alpha-methyl-leucine
  SITE 16: note = L-ornithine
  SITE 17: note = Lysine is chemically modified through conjugation of the epsilon-amino group of the Lysine side chain with (gamma-Glu)2-CO-(CH2)16-CO2H
  SITE 20: note = 2-Aminoisobutyric Acid
  SITE 21: note = L-ornithine
  SITE 24: note = D-amino acid
  SITE 25: note = alpha-methyl-L-tyrosine

SEQ ID NO: 527 - protein, 42 aa, synthetic construct; identical to SEQ ID NO: 507
  SITE 2: note = 2-Aminoisobutyric Acid
  SITE 6: note = alpha-methyl-2-fluoro-L-phenylalanine
  SITE 10: note = 3-(4-Pyridyl)-L-alanine
  SITE 11: note = alpha-methyl-L-serine
  SITE 13: note = alpha-methyl-leucine
  SITE 16: note = L-ornithine
  SITE 17: note = Lysine is chemically modified through conjugation of the epsilon-amino group of the Lysine side chain with (gamma-Glu)2-CO-(CH2)16-CO2H
  SITE 20: note = 2-Aminoisobutyric Acid
  SITE 21: note = L-ornithine
  SITE 24: note = D-amino acid
  SITE 42: note = Amidated residue

SEQ ID NO: 528 - protein, 42 aa, synthetic construct; identical to SEQ ID NO: 507
  SITE 2: note = 2-Aminoisobutyric Acid
  SITE 6: note = alpha-methyl-2-fluoro-L-phenylalanine
  SITE 10: note = 3-(4-Pyridyl)-L-alanine
  SITE 11: note = alpha-methyl-L-serine
  SITE 13: note = alpha-methyl-leucine
  SITE 16: note = L-ornithine
  SITE 17: note = Lysine is chemically modified through conjugation of the epsilon-amino group of the Lysine side chain with (gamma-Glu)2-CO-(CH2)16-CO2H
  SITE 20: note = 2-Aminoisobutyric Acid
  SITE 21: note = L-ornithine
  SITE 24: note = D-amino acid

SEQ ID NO: 529 - protein, 43 aa, synthetic construct
  SITE 2: note = 2-Aminoisobutyric Acid
  SITE 6: note = alpha-methyl-2-fluoro-L-phenylalanine
  SITE 10: note = 3-(4-Pyridyl)-L-alanine
  SITE 11: note = alpha-methyl-L-serine
  SITE 13: note = alpha-methyl-leucine
  SITE 16: note = L-ornithine
  SITE 17: note = Lysine is chemically modified through conjugation of the epsilon-amino group of the Lysine side chain with (gamma-Glu)2-CO-(CH2)16-CO2H
  SITE 20: note = 2-Aminoisobutyric Acid
  SITE 21: note = L-ornithine
  SITE 24: note = D-amino acid
  SITE 43: note = Amidated residue
YXQGTXTSDXXIXLDXKAQXXFIEYLIEGGPSSGEPPPSGTGE

SEQ ID NO: 530 - protein, 43 aa, synthetic construct; identical to SEQ ID NO: 529
  SITE 2: note = 2-Aminoisobutyric Acid
  SITE 6: note = alpha-methyl-2-fluoro-L-phenylalanine
  SITE 10: note = 3-(4-Pyridyl)-L-alanine
  SITE 11: note = alpha-methyl-L-serine
  SITE 13: note = alpha-methyl-leucine
  SITE 16: note = L-ornithine
  SITE 17: note = Lysine is chemically modified through conjugation of the epsilon-amino group of the Lysine side chain with (gamma-Glu)2-CO-(CH2)16-CO2H
  SITE 20: note = 2-Aminoisobutyric Acid
  SITE 21: note = L-ornithine
  SITE 24: note = D-amino acid

SEQ ID NO: 531 - protein, 41 aa, synthetic construct
  SITE 2: note = 2-Aminoisobutyric Acid
  SITE 6: note = alpha-methyl-2-fluoro-L-phenylalanine
  SITE 10: note = 3-(4-Pyridyl)-L-alanine
  SITE 11: note = alpha-methyl-L-serine
  SITE 13: note = alpha-methyl-leucine
  SITE 16: note = L-ornithine
  SITE 17: note = Lysine is chemically modified through conjugation of the epsilon-amino group of the Lysine side chain with (gamma-Glu)2-CO-(CH2)16-CO2H
  SITE 20: note = 2-Aminoisobutyric Acid
  SITE 24: note = D-amino acid
  SITE 25: note = alpha-methyl-L-tyrosine
  SITE 41: note = Amidated residue
YXQGTXTSDXXIXLDXKAQXNFIEXLQEGGPSSGEPPPEGT

SEQ ID NO: 532 - protein, 42 aa, synthetic construct
  SITE 2: note = 2-Aminoisobutyric Acid
  SITE 6: note = alpha-methyl-2-fluoro-L-phenylalanine
  SITE 10: note = 3-(4-Pyridyl)-L-alanine
  SITE 11: note = alpha-methyl-L-serine
  SITE 13: note = alpha-methyl-leucine
  SITE 16: note = L-ornithine
  SITE 17: note = Lysine is chemically modified through conjugation of the epsilon-amino group of the Lysine side chain with (gamma-Glu)2-CO-(CH2)16-CO2H
  SITE 20: note = 2-Aminoisobutyric Acid
  SITE 24: note = D-amino acid
  SITE 25: note = alpha-methyl-L-tyrosine
  SITE 42: note = Amidated residue
YXQGTXTSDXXIXLDXKAQXNFIEXLQEGGPSSGEPPPEGTE

SEQ ID NO: 533 - protein, 43 aa, synthetic construct
  SITE 2: note = 2-Aminoisobutyric Acid
  SITE 6: note = alpha-methyl-2-fluoro-L-phenylalanine
  SITE 10: note = 3-(4-Pyridyl)-L-alanine
  SITE 11: note = alpha-methyl-L-serine
  SITE 13: note = alpha-methyl-leucine
  SITE 16: note = L-ornithine
  SITE 17: note = Lysine is chemically modified through conjugation of the epsilon-amino group of the Lysine side chain with (gamma-Glu)2-CO-(CH2)16-CO2H
  SITE 20: note = 2-Aminoisobutyric Acid
  SITE 24: note = D-amino acid
  SITE 25: note = alpha-methyl-L-tyrosine
  SITE 43: note = Amidated residue
YXQGTXTSDXXIXLDXKAQXNFIEXLQEGGPSSGEPPPEGTGE

SEQ ID NO: 534 - protein, 42 aa, synthetic construct
  SITE 2: note = 2-Aminoisobutyric Acid
  SITE 6: note = alpha-methyl-2-fluoro-L-phenylalanine
  SITE 10: note = 3-(4-Pyridyl)-L-alanine
  SITE 11: note = alpha-methyl-L-serine
  SITE 13: note = alpha-methyl-leucine
  SITE 16: note = L-ornithine
  SITE 17: note = Lysine is chemically modified through conjugation of the epsilon-amino group of the Lysine side chain with (gamma-Glu)2-CO-(CH2)16-CO2H
  SITE 20: note = 2-Aminoisobutyric Acid
  SITE 24: note = D-amino acid
  SITE 25: note = alpha-methyl-L-tyrosine
  SITE 42: note = Amidated residue
YXQGTXTSDXXIXLDXKAQXQFIEXLQEGGPSSGEPPPEGTE

SEQ ID NO: 535 - protein, 43 aa, synthetic construct
  SITE 2: note = 2-Aminoisobutyric Acid
  SITE 6: note = alpha-methyl-2-fluoro-L-phenylalanine
  SITE 10: note = 3-(4-Pyridyl)-L-alanine
  SITE 11: note = alpha-methyl-L-serine
  SITE 13: note = alpha-methyl-leucine
  SITE 16: note = L-ornithine
  SITE 17: note = Lysine is chemically modified through conjugation of the epsilon-amino group of the Lysine side chain with (gamma-Glu)2-CO-(CH2)16-CO2H
  SITE 20: note = 2-Aminoisobutyric Acid
  SITE 24: note = D-amino acid
  SITE 25: note = alpha-methyl-L-tyrosine
  SITE 43: note = Amidated residue
YXQGTXTSDXXIXLDXKAQXQFIEXLQEGGPSSGEPPPEGTGE

SEQ ID NO: 536 - protein, 42 aa, synthetic construct
  SITE 2: note = 2-Aminoisobutyric Acid
  SITE 6: note = alpha-methyl-2-fluoro-L-phenylalanine
  SITE 10: note = 3-(4-Pyridyl)-L-alanine
  SITE 11: note = alpha-methyl-L-serine
  SITE 13: note = alpha-methyl-leucine
  SITE 16: note = L-ornithine
  SITE 17: note = Lysine is chemically modified through conjugation of the epsilon-amino group of the Lysine side chain with (gamma-Glu)2-CO-(CH2)16-CO2H
  SITE 20: note = 2-Aminoisobutyric Acid
  SITE 21: note = L-ornithine
  SITE 24: note = D-amino acid
  SITE 42: note = Amidated residue
YXQGTXTSDXXIXLDXKAQXXFIEYLSEGGPSSGEPPPSGTE

SEQ ID NO: 537 - protein, 42 aa, synthetic construct
  SITE 2: note = 2-Aminoisobutyric Acid
  SITE 6: note = alpha-methyl-2-fluoro-L-phenylalanine
  SITE 10: note = 3-(4-Pyridyl)-L-alanine
  SITE 11: note = alpha-methyl-L-serine
  SITE 16: note = L-ornithine
  SITE 17: note = Lysine is chemically modified through conjugation of the epsilon-amino group of the Lysine side chain with (gamma-Glu)2-CO-(CH2)16-CO2H
  SITE 20: note = 2-Aminoisobutyric Acid
  SITE 21: note = L-ornithine
  SITE 24: note = D-amino acid
  SITE 42: note = Amidated residue
YXQGTXTSDXXILLDXKAQXXFIEYLIEGGPSSGEPPPSGTE

SEQ ID NO: 538 - protein, 42 aa, synthetic construct
  SITE 2: note = 2-Aminoisobutyric Acid
  SITE 6: note = alpha-methyl-2-fluoro-L-phenylalanine
  SITE 10: note = 3-(4-Pyridyl)-L-alanine
  SITE 11: note = alpha-methyl-L-serine
  SITE 13: note = alpha-methyl-leucine
  SITE 16: note = L-ornithine
  SITE 17: note = Lysine is chemically modified through conjugation of the epsilon-amino group of the Lysine side chain with (gamma-Glu)2-CO-(CH2)16-CO2H
  SITE 20: note = 2-Aminoisobutyric Acid
  SITE 21: note = L-ornithine
  SITE 24: note = D-amino acid
  SITE 42: note = Amidated residue
YXQGTXTSDXXIXLDXKAQXXFIEYLLEGGPSSGEPPPSGTE

SEQ ID NO: 539 - protein, 43 aa, synthetic construct
  SITE 2: note = 2-Aminoisobutyric Acid
  SITE 6: note = alpha-methyl-2-fluoro-L-phenylalanine
  SITE 10: note = 3-(4-Pyridyl)-L-alanine
  SITE 11: note = alpha-methyl-L-serine
  SITE 13: note = alpha-methyl-leucine
  SITE 16: note = L-ornithine
  SITE 17: note = Lysine is chemically modified through conjugation of the epsilon-amino group of the Lysine side chain with (2-[2-(2-Amino-ethoxy)-ethoxy]-acetyl)-(gamma-Glu)-CO-(CH2) 16-CO2H
  SITE 20: note = 2-Aminoisobutyric Acid
  SITE 21: note = L-ornithine
  SITE 24: note = D-amino acid
  SITE 43: note = Amidated residue
YXQGTXTSDXXIXLDXKAQXXFIEYLIEGGPSSGEPPPSGTEE

SEQ ID NO: 540 - protein, 44 aa, synthetic construct
  SITE 2: note = 2-Aminoisobutyric Acid
  SITE 6: note = alpha-methyl-2-fluoro-L-phenylalanine
  SITE 10: note = 3-(4-Pyridyl)-L-alanine
  SITE 11: note = alpha-methyl-L-serine
  SITE 13: note = alpha-methyl-leucine
  SITE 16: note = L-ornithine
  SITE 17: note = Lysine is chemically modified through conjugation of the epsilon-amino group of the Lysine side chain with (2-[2-(2-Amino-ethoxy)-ethoxy]-acetyl)-(gamma-Glu)-CO-(CH2) 16-CO2H
  SITE 20: note = 2-Aminoisobutyric Acid
  SITE 21: note = L-ornithine
  SITE 24: note = D-amino acid
  SITE 44: note = Amidated residue
YXQGTXTSDXXIXLDXKAQXXFIEYLIEGGPSSGEPPPSGTEEE

SEQ ID NO: 541 - protein, 43 aa, synthetic construct; identical to SEQ ID NO: 539
  SITE 2: note = 2-Aminoisobutyric Acid
  SITE 6: note = alpha-methyl-2-fluoro-L-phenylalanine
  SITE 10: note = 3-(4-Pyridyl)-L-alanine
  SITE 11: note = alpha-methyl-L-serine
  SITE 13: note = alpha-methyl-leucine
  SITE 16: note = L-ornithine
  SITE 17: note = Lysine is chemically modified through conjugation of the epsilon-amino group of the Lysine side chain with (gamma-Glu)2-CO-(CH2)16-CO2H
  SITE 20: note = 2-Aminoisobutyric Acid
  SITE 21: note = L-ornithine
  SITE 24: note = D-amino acid
  SITE 43: note = Amidated residue

SEQ ID NO: 542 - protein, 44 aa, synthetic construct; identical to SEQ ID NO: 540
  SITE 2: note = 2-Aminoisobutyric Acid
  SITE 6: note = alpha-methyl-2-fluoro-L-phenylalanine
  SITE 10: note = 3-(4-Pyridyl)-L-alanine
  SITE 11: note = alpha-methyl-L-serine
  SITE 13: note = alpha-methyl-leucine
  SITE 16: note = L-ornithine
  SITE 17: note = Lysine is chemically modified through conjugation of the epsilon-amino group of the Lysine side chain with (gamma-Glu)2-CO-(CH2)16-CO2H
  SITE 20: note = 2-Aminoisobutyric Acid
  SITE 21: note = L-ornithine
  SITE 24: note = D-amino acid
  SITE 44: note = Amidated residue

SEQ ID NO: 543 - protein, 43 aa, synthetic construct; identical to SEQ ID NO: 539
  SITE 2: note = 2-Aminoisobutyric Acid
  SITE 6: note = alpha-methyl-2-fluoro-L-phenylalanine
  SITE 10: note = 3-(4-Pyridyl)-L-alanine
  SITE 11: note = alpha-methyl-L-serine
  SITE 13: note = alpha-methyl-leucine
  SITE 16: note = L-ornithine
  SITE 17: note = Lysine is chemically modified through conjugation of the epsilon-amino group of the Lysine side chain with (2-[2-(2-Amino-ethoxy)-ethoxy]-acetyl)-(gamma-Glu)-CO-(CH2) 16-CO2H
  SITE 20: note = 2-Aminoisobutyric Acid
  SITE 21: note = L-ornithine
  SITE 24: note = D-amino acid

SEQ ID NO: 544 - protein, 44 aa, synthetic construct; identical to SEQ ID NO: 540
  SITE 2: note = 2-Aminoisobutyric Acid
  SITE 6: note = alpha-methyl-2-fluoro-L-phenylalanine
  SITE 10: note = 3-(4-Pyridyl)-L-alanine
  SITE 11: note = alpha-methyl-L-serine
  SITE 13: note = alpha-methyl-leucine
  SITE 16: note = L-ornithine
  SITE 17: note = Lysine is chemically modified through conjugation of the epsilon-amino group of the Lysine side chain with (2-[2-(2-Amino-ethoxy)-ethoxy]-acetyl)-(gamma-Glu)-CO-(CH2) 16-CO2H
  SITE 20: note = 2-Aminoisobutyric Acid
  SITE 21: note = L-ornithine
  SITE 24: note = D-amino acid
  SITE 44: note = Amidated residue

SEQ ID NO: 545 - protein, 43 aa, synthetic construct; identical to SEQ ID NO: 539
  SITE 2: note = 2-Aminoisobutyric Acid
  SITE 6: note = alpha-methyl-2-fluoro-L-phenylalanine
  SITE 10: note = 3-(4-Pyridyl)-L-alanine
  SITE 11: note = alpha-methyl-L-serine
  SITE 13: note = alpha-methyl-leucine
  SITE 16: note = L-ornithine
  SITE 17: note = Lysine is chemically modified through conjugation of the epsilon-amino group of the Lysine side chain with (gamma-Glu)2-CO-(CH2)16-CO2H
  SITE 20: note = 2-Aminoisobutyric Acid
  SITE 21: note = L-ornithine
  SITE 24: note = D-amino acid

SEQ ID NO: 546 - protein, 44 aa, synthetic construct; identical to SEQ ID NO: 540
  SITE 2: note = 2-Aminoisobutyric Acid
  SITE 6: note = alpha-methyl-2-fluoro-L-phenylalanine
  SITE 10: note = 3-(4-Pyridyl)-L-alanine
  SITE 11: note = alpha-methyl-L-serine
  SITE 13: note = alpha-methyl-leucine
  SITE 16: note = L-ornithine
  SITE 17: note = Lysine is chemically modified through conjugation of the epsilon-amino group of the Lysine side chain with (gamma-Glu)2-CO-(CH2)16-CO2H
  SITE 20: note = 2-Aminoisobutyric Acid
  SITE 21: note = L-ornithine
  SITE 24: note = D-amino acid
  SITE 44: note = Amidated residue

SEQ ID NO: 547 - protein, 41 aa, synthetic construct; identical to SEQ ID NO: 506
  SITE 2: note = 2-Aminoisobutyric Acid
  SITE 6: note = alpha-methyl-2-fluoro-L-phenylalanine
  SITE 10: note = 3-(4-Pyridyl)-L-alanine
  SITE 13: note = alpha-methyl-leucine
  SITE 16: note = L-ornithine
  SITE 17: note = Lysine is chemically modified through conjugation of the epsilon-amino group of the Lysine side chain with (gamma-Glu)2-CO-(CH2)16-CO2H
  SITE 20: note = 3-(4-Pyridyl)-L-alanine
  SITE 21: note = L-ornithine
  SITE 24: note = D-amino acid

SEQ ID NO: 548 - protein, 42 aa, synthetic construct
  SITE 2: note = 2-Aminoisobutyric Acid
  SITE 6: note = alpha-methyl-2-fluoro-L-phenylalanine
  SITE 10: note = 3-(4-Pyridyl)-L-alanine
  SITE 11: note = alpha-methyl-L-serine
  SITE 13: note = alpha-methyl-leucine
  SITE 16: note = L-ornithine
  SITE 17: note = Lysine is chemically modified through conjugation of the epsilon-amino group of the Lysine side chain with (gamma-Glu)2-CO-(CH2)16-CO2H
  SITE 20: note = 2-Aminoisobutyric Acid
  SITE 21: note = L-ornithine
  SITE 24: note = D-amino acid
  SITE 25: note = alpha-methyl-L-tyrosine
  SITE 42: note = Amidated residue
YXQGTXTSDXXIXLDXKAQXXFIEXLTEGGPSSGEPPPSGTE

SEQ ID NO: 549 - protein, 43 aa, synthetic construct
  SITE 2: note = 2-Aminoisobutyric Acid
  SITE 6: note = alpha-methyl-2-fluoro-L-phenylalanine
  SITE 10: note = 3-(4-Pyridyl)-L-alanine
  SITE 11: note = alpha-methyl-L-serine
  SITE 13: note = alpha-methyl-leucine
  SITE 16: note = L-ornithine
  SITE 17: note = Lysine is chemically modified through conjugation of the epsilon-amino group of the Lysine side chain with (gamma-Glu)2-CO-(CH2)16-CO2H
  SITE 20: note = 2-Aminoisobutyric Acid
  SITE 21: note = L-ornithine
  SITE 24: note = D-amino acid
  SITE 25: note = alpha-methyl-L-tyrosine
  SITE 43: note = Amidated residue
YXQGTXTSDXXIXLDXKAQXXFIEXLTEGGPSSGEPPPSGTGE

SEQ ID NO: 550 - protein, 42 aa, synthetic construct
  SITE 2: note = 2-Aminoisobutyric Acid
  SITE 6: note = alpha-methyl-2-fluoro-L-phenylalanine
  SITE 10: note = 3-(4-Pyridyl)-L-alanine
  SITE 11: note = alpha-methyl-L-serine
  SITE 13: note = alpha-methyl-leucine
  SITE 16: note = L-ornithine
  SITE 17: note = Lysine is chemically modified through conjugation of the epsilon-amino group of the Lysine side chain with (gamma-Glu)2-CO-(CH2)16-CO2H
  SITE 20: note = 2-Aminoisobutyric Acid
  SITE 21: note = L-ornithine
  SITE 24: note = D-amino acid
  SITE 25: note = alpha-methyl-L-tyrosine
  SITE 42: note = Amidated residue
YXQGTXTSDXXIXLDXKAQXXFIEXLAEGGPSSGEPPPSGTE

SEQ ID NO: 551 - protein, 43 aa, synthetic construct
  SITE 2: note = 2-Aminoisobutyric Acid
  SITE 6: note = alpha-methyl-2-fluoro-L-phenylalanine
  SITE 10: note = 3-(4-Pyridyl)-L-alanine
  SITE 11: note = alpha-methyl-L-serine
  SITE 13: note = alpha-methyl-leucine
  SITE 16: note = L-ornithine
  SITE 17: note = Lysine is chemically modified through conjugation of the epsilon-amino group of the Lysine side chain with (gamma-Glu)2-CO-(CH2)16-CO2H
  SITE 20: note = 2-Aminoisobutyric Acid
  SITE 21: note = L-ornithine
  SITE 24: note = D-amino acid
  SITE 25: note = alpha-methyl-L-tyrosine
  SITE 43: note = Amidated residue
YXQGTXTSDXXIXLDXKAQXXFIEXLAEGGPSSGEPPPSGTGE

SEQ ID NO: 552 - protein, 42 aa, synthetic construct
  SITE 2: note = 2-Aminoisobutyric Acid
  SITE 6: note = alpha-methyl-2-fluoro-L-phenylalanine
  SITE 10: note = 3-(4-Pyridyl)-L-alanine
  SITE 11: note = alpha-methyl-L-serine
  SITE 16: note = L-ornithine
  SITE 17: note = Lysine is chemically modified through conjugation of the epsilon-amino group of the Lysine side chain with (gamma-Glu)2-CO-(CH2)16-CO2H
  SITE 20: note = 2-Aminoisobutyric Acid
  SITE 21: note = L-ornithine
  SITE 24: note = D-amino acid
  SITE 25: note = alpha-methyl-L-tyrosine
  SITE 42: note = Amidated residue
YXQGTXTSDXXILLDXKAQXXFIEXLQEGGPSSGEPPPEGAE

SEQ ID NO: 553 - protein, 42 aa, synthetic construct
  SITE 2: note = 2-Aminoisobutyric Acid
  SITE 6: note = alpha-methyl-2-fluoro-L-phenylalanine
  SITE 10: note = 3-(4-Pyridyl)-L-alanine
  SITE 11: note = alpha-methyl-L-serine
  SITE 16: note = L-ornithine
  SITE 17: note = Lysine is chemically modified through conjugation of the epsilon-amino group of the Lysine side chain with (gamma-Glu)2-CO-(CH2)16-CO2H
  SITE 20: note = 2-Aminoisobutyric Acid
  SITE 21: note = L-ornithine
  SITE 24: note = D-amino acid
  SITE 25: note = alpha-methyl-L-tyrosine
  SITE 42: note = Amidated residue
YXQGTXTSDXXILLDXKAQXXFIEXLQEGGPSSGEPPPSGAE

SEQ ID NO: 554 - protein, 43 aa, synthetic construct
  SITE 2: note = 2-Aminoisobutyric Acid
  SITE 6: note = alpha-methyl-2-fluoro-L-phenylalanine
  SITE 10: note = 3-(4-Pyridyl)-L-alanine
  SITE 11: note = alpha-methyl-L-serine
  SITE 16: note = L-ornithine
  SITE 17: note = Lysine is chemically modified through conjugation of the epsilon-amino group of the Lysine side chain with (gamma-Glu)2-CO-(CH2)16-CO2H
  SITE 20: note = 2-Aminoisobutyric Acid
  SITE 21: note = L-ornithine
  SITE 24: note = D-amino acid
  SITE 43: note = Amidated residue
YXQGTXTSDXXILLDXKAQXXFIEYLIEGGPSSGEPPPSGTGE

SEQ ID NO: 555 - protein, 42 aa, synthetic construct
  SITE 2: note = 2-Aminoisobutyric Acid
  SITE 6: note = alpha-methyl-2-fluoro-L-phenylalanine
  SITE 10: note = 3-(4-Pyridyl)-L-alanine
  SITE 17: note = Lysine is chemically modified through conjugation of the epsilon-amino group of the Lysine side chain with (gamma-Glu)2-CO-(CH2)16-CO2H
  SITE 20: note = 2-Aminoisobutyric Acid
  SITE 42: note = Amidated residue
YXQGTXTSDXSILLDKKAQXAFIEWLEEGGPSSGAPPPSGTE

SEQ ID NO: 556 - protein, 42 aa, synthetic construct
  SITE 2: note = 2-Aminoisobutyric Acid
  SITE 6: note = alpha-methyl-2-fluoro-L-phenylalanine
  SITE 10: note = 3-(4-Pyridyl)-L-alanine
  SITE 17: note = Lysine is chemically modified through conjugation of the epsilon-amino group of the Lysine side chain with (gamma-Glu)2-CO-(CH2)16-CO2H
  SITE 20: note = 2-Aminoisobutyric Acid
  SITE 25: note = 3-(4-Pyridyl)-L-alanine
  SITE 42: note = Amidated residue
YXQGTXTSDXSILLDKKAQXAFIEXLEEGGPSSGAPPPSGTE

SEQ ID NO: 557 - protein, 42 aa, synthetic construct; identical to SEQ ID NO: 556
  SITE 2: note = 2-Aminoisobutyric Acid
  SITE 6: note = alpha-methyl-2-fluoro-L-phenylalanine
  SITE 10: note = 3-(4-Pyridyl)-L-alanine
  SITE 17: note = Lysine is chemically modified through conjugation of the epsilon-amino group of the Lysine side chain with (gamma-Glu)2-CO-(CH2)16-CO2H
  SITE 20: note = 2-Aminoisobutyric Acid
  SITE 25: note = alpha-methyl-L-tyrosine
  SITE 42: note = Amidated residue

SEQ ID NO: 558 - protein, 42 aa, synthetic construct; identical to SEQ ID NO: 556
  SITE 2: note = 2-Aminoisobutyric Acid
  SITE 6: note = alpha-methyl-2-fluoro-L-phenylalanine
  SITE 10: note = 3-(4-Pyridyl)-L-alanine
  SITE 17: note = Lysine is chemically modified through conjugation of the epsilon-amino group of the Lysine side chain with (gamma-Glu)2-CO-(CH2)16-CO2H
  SITE 20: note = 2-Aminoisobutyric Acid
  SITE 25: note = 3-(4-Pyridyl)-L-alanine
  SITE 42: note = Amidated residue

SEQ ID NO: 559 - protein, 42 aa, synthetic construct
  SITE 2: note = 2-Aminoisobutyric Acid
  SITE 6: note = alpha-methyl-2-fluoro-L-phenylalanine
  SITE 10: note = 3-(4-Pyridyl)-L-alanine
  SITE 17: note = Lysine is chemically modified through conjugation of the epsilon-amino group of the Lysine side chain with (gamma-Glu)2-CO-(CH2)16-CO2H
  SITE 20: note = 2-Aminoisobutyric Acid
  SITE 42: note = Amidated residue
YXQGTXTSDXSILLDKKAQXAFIEYLQEGGPSSGAPPPSGTE

SEQ ID NO: 560 - protein, 42 aa, synthetic construct
  SITE 2: note = 2-Aminoisobutyric Acid
  SITE 6: note = alpha-methyl-2-fluoro-L-phenylalanine
  SITE 10: note = 3-(4-Pyridyl)-L-alanine
  SITE 17: note = Lysine is chemically modified through conjugation of the epsilon-amino group of the Lysine side chain with (gamma-Glu)2-CO-(CH2)16-CO2H
  SITE 20: note = 2-Aminoisobutyric Acid
  SITE 42: note = Amidated residue
YXQGTXTSDXSILLDKKAQXAFIEYLTEGGPSSGAPPPSGTE

SEQ ID NO: 561 - protein, 42 aa, synthetic construct
  SITE 2: note = 2-Aminoisobutyric Acid
  SITE 6: note = alpha-methyl-2-fluoro-L-phenylalanine
  SITE 10: note = 3-(4-Pyridyl)-L-alanine
  SITE 11: note = alpha-methyl-L-serine
  SITE 16: note = L-ornithine
  SITE 17: note = Lysine is chemically modified through conjugation of the epsilon-amino group of the Lysine side chain with (gamma-Glu)2-CO-(CH2)16-CO2H
  SITE 20: note = 2-Aminoisobutyric Acid
  SITE 21: note = L-ornithine
  SITE 24: note = D-amino acid
  SITE 42: note = Amidated residue
YXQGTXTSDXXILLDXKAQXXFIEYLIEGGPSSGEPPPSETE

SEQ ID NO: 562 - protein, 43 aa, synthetic construct
  SITE 2: note = 2-Aminoisobutyric Acid
  SITE 6: note = alpha-methyl-2-fluoro-L-phenylalanine
  SITE 10: note = 3-(4-Pyridyl)-L-alanine
  SITE 11: note = alpha-methyl-L-serine
  SITE 16: note = L-ornithine
  SITE 17: note = Lysine is chemically modified through conjugation of the epsilon-amino group of the Lysine side chain with (gamma-Glu)2-CO-(CH2)16-CO2H
  SITE 20: note = 2-Aminoisobutyric Acid
  SITE 21: note = L-ornithine
  SITE 24: note = D-amino acid
  SITE 43: note = Amidated residue
YXQGTXTSDXXILLDXKAQXXFIEYLIEGGPSSGEPPPEGTEE

SEQ ID NO: 563 - protein, 43 aa, synthetic construct
  SITE 2: note = 2-Aminoisobutyric Acid
  SITE 6: note = alpha-methyl-2-fluoro-L-phenylalanine
  SITE 10: note = 3-(4-Pyridyl)-L-alanine
  SITE 11: note = alpha-methyl-L-serine
  SITE 13: note = alpha-methyl-leucine
  SITE 16: note = L-ornithine
  SITE 17: note = Lysine is chemically modified through conjugation of the epsilon-amino group of the Lysine side chain with (gamma-Glu)2-CO-(CH2)16-CO2H
  SITE 20: note = 2-Aminoisobutyric Acid
  SITE 21: note = L-ornithine
  SITE 24: note = D-amino acid
  SITE 25: note = alpha-methyl-L-tyrosine
  SITE 43: note = Amidated residue
YXQGTXTSDXXIXLDXKAQXXFIEXLQEGGPSSGEPPPEGTEE

SEQ ID NO: 564 - protein, 44 aa, synthetic construct
  SITE 2: note = 2-Aminoisobutyric Acid
  SITE 6: note = alpha-methyl-2-fluoro-L-phenylalanine
  SITE 10: note = 3-(4-Pyridyl)-L-alanine
  SITE 11: note = alpha-methyl-L-serine
  SITE 13: note = alpha-methyl-leucine
  SITE 16: note = L-ornithine
  SITE 17: note = Lysine is chemically modified through conjugation of the epsilon-amino group of the Lysine side chain with (gamma-Glu)2-CO-(CH2)16-CO2H
  SITE 20: note = 2-Aminoisobutyric Acid
  SITE 21: note = L-ornithine
  SITE 24: note = D-amino acid
  SITE 25: note = alpha-methyl-L-tyrosine
  SITE 44: note = Amidated residue
YXQGTXTSDXXIXLDXKAQXXFIEXLQEGGPSSGEPPPEGTEEE

SEQ ID NO: 565 - protein, 42 aa, synthetic construct
  SITE 2: note = 2-Aminoisobutyric Acid
  SITE 6: note = alpha-methyl-2-fluoro-L-phenylalanine
  SITE 10: note = 3-(4-Pyridyl)-L-alanine
  SITE 11: note = alpha-methyl-L-serine
  SITE 13: note = alpha-methyl-leucine
  SITE 16: note = L-ornithine
  SITE 17: note = Lysine is chemically modified through conjugation of the epsilon-amino group of the Lysine side chain with (gamma-Glu)2-CO-(CH2)16-CO2H
  SITE 20: note = 2-Aminoisobutyric Acid
  SITE 21: note = L-ornithine
  SITE 24: note = D-amino acid
  SITE 25: note = alpha-methyl-L-tyrosine
  SITE 42: note = Amidated residue
YXQGTXTSDXXIXLDXKAQXXFIEXLSEGGPSSGEPPPSGGE

SEQ ID NO: 566 - protein, 42 aa, synthetic construct
  SITE 2: note = 2-Aminoisobutyric Acid
  SITE 6: note = alpha-methyl-2-fluoro-L-phenylalanine
  SITE 10: note = 3-(4-Pyridyl)-L-alanine
  SITE 11: note = alpha-methyl-L-serine
  SITE 13: note = alpha-methyl-leucine
  SITE 16: note = L-ornithine
  SITE 17: note = Lysine is chemically modified through conjugation of the epsilon-amino group of the Lysine side chain with (gamma-Glu)2-CO-(CH2)16-CO2H
  SITE 20: note = 2-Aminoisobutyric Acid
  SITE 21: note = L-ornithine
  SITE 24: note = D-amino acid
  SITE 25: note = alpha-methyl-L-tyrosine
  SITE 42: note = Amidated residue
YXQGTXTSDXXIXLDXKAQXXFIEXLSEGGPSSGEPPPSGSE

SEQ ID NO: 567 - protein, 43 aa, synthetic construct
  SITE 2: note = 2-Aminoisobutyric Acid
  SITE 6: note = alpha-methyl-2-fluoro-L-phenylalanine
  SITE 10: note = 3-(4-Pyridyl)-L-alanine
  SITE 11: note = alpha-methyl-L-serine
  SITE 13: note = alpha-methyl-leucine
  SITE 16: note = L-ornithine
  SITE 17: note = Lysine is chemically modified through conjugation of the epsilon-amino group of the Lysine side chain with (gamma-Glu)2-CO-(CH2)16-CO2H
  SITE 20: note = 2-Aminoisobutyric Acid
  SITE 21: note = L-ornithine
  SITE 24: note = D-amino acid
  SITE 25: note = alpha-methyl-L-tyrosine
  SITE 43: note = Amidated residue
YXQGTXTSDXXIXLDXKAQXXFIEXLSEGGPSSGEPPPSGTEE

SEQ ID NO: 568 - protein, 44 aa, synthetic construct
  SITE 2: note = 2-Aminoisobutyric Acid
  SITE 6: note = alpha-methyl-2-fluoro-L-phenylalanine
  SITE 10: note = 3-(4-Pyridyl)-L-alanine
  SITE 11: note = alpha-methyl-L-serine
  SITE 13: note = alpha-methyl-leucine
  SITE 16: note = L-ornithine
  SITE 17: note = Lysine is chemically modified through conjugation of the epsilon-amino group of the Lysine side chain with (gamma-Glu)2-CO-(CH2)16-CO2H
  SITE 20: note = 2-Aminoisobutyric Acid
  SITE 21: note = L-ornithine
  SITE 24: note = D-amino acid
  SITE 25: note = alpha-methyl-L-tyrosine
  SITE 44: note = Amidated residue
YXQGTXTSDXXIXLDXKAQXXFIEXLSEGGPSSGEPPPSGTEEE

SEQ ID NO: 569 - protein, 42 aa, synthetic construct; identical to SEQ ID NO: 523
  SITE 2: note = 2-Aminoisobutyric Acid
  SITE 6: note = alpha-methyl-2-fluoro-L-phenylalanine
  SITE 10: note = 3-(4-Pyridyl)-L-alanine
  SITE 11: note = alpha-methyl-L-serine
  SITE 13: note = alpha-methyl-leucine
  SITE 16: note = L-ornithine
  SITE 17: note = Lysine is chemically modified through conjugation of the epsilon-amino group of the Lysine side chain with (Glu)-(gamma-Glu)-CO-(CH2)16-CO2H
  SITE 20: note = 2-Aminoisobutyric Acid
  SITE 21: note = L-ornithine
  SITE 24: note = D-amino acid
  SITE 25: note = alpha-methyl-L-tyrosine
  SITE 42: note = Amidated residue

SEQ ID NO: 570 - protein, 43 aa, synthetic construct; identical to SEQ ID NO: 567
  SITE 2: note = 2-Aminoisobutyric Acid
  SITE 6: note = alpha-methyl-2-fluoro-L-phenylalanine
  SITE 10: note = 3-(4-Pyridyl)-L-alanine
  SITE 11: note = alpha-methyl-L-serine
  SITE 13: note = alpha-methyl-leucine
  SITE 16: note = L-ornithine
  SITE 17: note = Lysine is chemically modified through conjugation of the epsilon-amino group of the Lysine side chain with (Glu)-(gamma-Glu)-CO-(CH2)16-CO2H
  SITE 20: note = 2-Aminoisobutyric Acid
  SITE 21: note = L-ornithine
  SITE 24: note = D-amino acid
  SITE 25: note = alpha-methyl-L-tyrosine
  SITE 43: note = Amidated residue

SEQ ID NO: 571 - protein, 42 aa, synthetic construct; identical to SEQ ID NO: 523
  SITE 2: note = 2-Aminoisobutyric Acid
  SITE 6: note = alpha-methyl-2-fluoro-L-phenylalanine
  SITE 10: note = 3-(4-Pyridyl)-L-alanine
  SITE 11: note = alpha-methyl-L-serine
  SITE 13: note = alpha-methyl-leucine
  SITE 16: note = L-ornithine
  SITE 17: note = Lysine is chemically modified through conjugation of the epsilon-amino group of the Lysine side chain with (gamma-Glu)-(Glu)-CO-(CH2)16-CO2H
  SITE 20: note = 2-Aminoisobutyric Acid
  SITE 21: note = L-ornithine
  SITE 24: note = D-amino acid
  SITE 25: note = alpha-methyl-L-tyrosine
  SITE 42: note = Amidated residue

SEQ ID NO: 572 - protein, 43 aa, synthetic construct; identical to SEQ ID NO: 567
  SITE 2: note = 2-Aminoisobutyric Acid
  SITE 6: note = alpha-methyl-2-fluoro-L-phenylalanine
  SITE 10: note = 3-(4-Pyridyl)-L-alanine
  SITE 11: note = alpha-methyl-L-serine
  SITE 13: note = alpha-methyl-leucine
  SITE 16: note = L-ornithine
  SITE 17: note = Lysine is chemically modified through conjugation of the epsilon-amino group of the Lysine side chain with (gamma-Glu)-(Glu)-CO-(CH2)16-CO2H
  SITE 20: note = 2-Aminoisobutyric Acid
  SITE 21: note = L-ornithine
  SITE 24: note = D-amino acid
  SITE 25: note = alpha-methyl-L-tyrosine
  SITE 43: note = Amidated residue

SEQ ID NO: 573 - protein, 43 aa, synthetic construct
  SITE 2: note = 2-Aminoisobutyric Acid
  SITE 6: note = alpha-methyl-2-fluoro-L-phenylalanine
  SITE 10: note = 3-(4-Pyridyl)-L-alanine
  SITE 11: note = alpha-methyl-L-serine
  SITE 13: note = alpha-methyl-leucine
  SITE 16: note = L-ornithine
  SITE 17: note = Lysine is chemically modified through conjugation of the epsilon-amino group of the Lysine side chain with (gamma-Glu)2-CO-(CH2)16-CO2H
  SITE 20: note = 2-Aminoisobutyric Acid
  SITE 21: note = L-ornithine
  SITE 24: note = D-amino acid
  SITE 25: note = alpha-methyl-L-tyrosine
  SITE 43: note = Amidated residue
YXQGTXTSDXXIXLDXKAQXXFIEXLSEGGPSSGEPPPSGAEE

SEQ ID NO: 574 - protein, 43 aa, synthetic construct
  SITE 2: note = 2-Aminoisobutyric Acid
  SITE 6: note = alpha-methyl-2-fluoro-L-phenylalanine
  SITE 10: note = 3-(4-Pyridyl)-L-alanine
  SITE 11: note = alpha-methyl-L-serine
  SITE 13: note = alpha-methyl-leucine
  SITE 16: note = L-ornithine
  SITE 17: note = Lysine is chemically modified through conjugation of the epsilon-amino group of the Lysine side chain with (gamma-Glu)2-CO-(CH2)16-CO2H
  SITE 20: note = 2-Aminoisobutyric Acid
  SITE 21: note = L-ornithine
  SITE 24: note = D-amino acid
  SITE 25: note = alpha-methyl-L-tyrosine
  SITE 43: note = Amidated residue
YXQGTXTSDXXIXLDXKAQXXFIEXLSEGGPSSGEPPPSGGEE

SEQ ID NO: 575 - protein, 43 aa, synthetic construct
  SITE 2: note = 2-Aminoisobutyric Acid
  SITE 6: note = alpha-methyl-2-fluoro-L-phenylalanine
  SITE 10: note = 3-(4-Pyridyl)-L-alanine
  SITE 11: note = alpha-methyl-L-serine
  SITE 13: note = alpha-methyl-leucine
  SITE 16: note = L-ornithine
  SITE 17: note = Lysine is chemically modified through conjugation of the epsilon-amino group of the Lysine side chain with (gamma-Glu)2-CO-(CH2)16-CO2H
  SITE 20: note = 2-Aminoisobutyric Acid
  SITE 21: note = L-ornithine
  SITE 24: note = D-amino acid
  SITE 25: note = alpha-methyl-L-tyrosine
  SITE 43: note = Amidated residue
YXQGTXTSDXXIXLDXKAQXXFIEXLSEGGPSSGEPPPSGSEE

SEQ ID NO: 576 - protein, 43 aa, synthetic construct
  SITE 2: note = 2-Aminoisobutyric Acid
  SITE 6: note = alpha-methyl-2-fluoro-L-phenylalanine
  SITE 10: note = 3-(4-Pyridyl)-L-alanine
  SITE 11: note = alpha-methyl-L-serine
  SITE 13: note = alpha-methyl-leucine
  SITE 16: note = L-ornithine
  SITE 17: note = Lysine is chemically modified through conjugation of the epsilon-amino group of the Lysine side chain with (gamma-Glu)2-CO-(CH2)16-CO2H
  SITE 20: note = 2-Aminoisobutyric Acid
  SITE 21: note = L-ornithine
  SITE 24: note = D-amino acid
  SITE 25: note = alpha-methyl-L-tyrosine
  SITE 43: note = Amidated residue
YXQGTXTSDXXIXLDXKAQXXFIEXLSEGGPSSGEPPPSGQEE

SEQ ID NO: 577 - protein, 43 aa, synthetic construct
  SITE 2: note = 2-Aminoisobutyric Acid
  SITE 6: note = alpha-methyl-2-fluoro-L-phenylalanine
  SITE 10: note = 3-(4-Pyridyl)-L-alanine
  SITE 11: note = alpha-methyl-L-serine
  SITE 13: note = alpha-methyl-leucine
  SITE 16: note = L-ornithine
  SITE 17: note = Lysine is chemically modified through conjugation of the epsilon-amino group of the Lysine side chain with (gamma-Glu)2-CO-(CH2)16-CO2H
  SITE 20: note = 2-Aminoisobutyric Acid
  SITE 21: note = L-ornithine
  SITE 24: note = D-amino acid
  SITE 25: note = alpha-methyl-L-tyrosine
  SITE 43: note = Amidated residue
YXQGTXTSDXXIXLDXKAQXXFIEXLAEGGPSSGEPPPSGTEE

SEQ ID NO: 578 - protein, 43 aa, synthetic construct
  SITE 2: note = 2-Aminoisobutyric Acid
  SITE 6: note = alpha-methyl-2-fluoro-L-phenylalanine
  SITE 10: note = 3-(4-Pyridyl)-L-alanine
  SITE 11: note = alpha-methyl-L-serine
  SITE 13: note = alpha-methyl-leucine
  SITE 16: note = L-ornithine
  SITE 17: note = Lysine is chemically modified through conjugation of the epsilon-amino group of the Lysine side chain with (gamma-Glu)2-CO-(CH2)16-CO2H
  SITE 20: note = 2-Aminoisobutyric Acid
  SITE 21: note = L-ornithine
  SITE 24: note = D-amino acid
  SITE 25: note = alpha-methyl-L-tyrosine
  SITE 43: note = Amidated residue
YXQGTXTSDXXIXLDXKAQXXFIEXLQEGGPSSGEPPPSGTEE

SEQ ID NO: 579 - protein, 44 aa, synthetic construct
  SITE 2: note = 2-Aminoisobutyric Acid
  SITE 6: note = alpha-methyl-2-fluoro-L-phenylalanine
  SITE 10: note = 3-(4-Pyridyl)-L-alanine
  SITE 11: note = alpha-methyl-L-serine
  SITE 13: note = alpha-methyl-leucine
  SITE 16: note = L-ornithine
  SITE 17: note = Lysine is chemically modified through conjugation of the epsilon-amino group of the Lysine side chain with (gamma-Glu)2-CO-(CH2)16-CO2H
  SITE 20: note = 2-Aminoisobutyric Acid
  SITE 21: note = L-ornithine
  SITE 24: note = D-amino acid
  SITE 25: note = alpha-methyl-L-tyrosine
  SITE 44: note = Amidated residue
YXQGTXTSDXXIXLDXKAQXXFIEXLQEGGPSSGEPPPSGTEEE

SEQ ID NO: 580 - protein, 43 aa, synthetic construct
  SITE 2: note = 2-Aminoisobutyric Acid
  SITE 6: note = alpha-methyl-2-fluoro-L-phenylalanine
  SITE 10: note = 3-(4-Pyridyl)-L-alanine
  SITE 11: note = alpha-methyl-L-serine
  SITE 16: note = L-ornithine
  SITE 17: note = Lysine is chemically modified through conjugation of the epsilon-amino group of the Lysine side chain with (gamma-Glu)2-CO-(CH2)16-CO2H
  SITE 20: note = 2-Aminoisobutyric Acid
  SITE 21: note = L-ornithine
  SITE 24: note = D-amino acid
  SITE 25: note = alpha-methyl-L-tyrosine
  SITE 43: note = Amidated residue
YXQGTXTSDXXILLDXKAQXXFIEXLQEGGPSSGEPPPEGAEE

SEQ ID NO: 581 - protein, 43 aa, synthetic construct
  SITE 2: note = 2-Aminoisobutyric Acid
  SITE 6: note = alpha-methyl-2-fluoro-L-phenylalanine
  SITE 10: note = 3-(4-Pyridyl)-L-alanine
  SITE 11: note = alpha-methyl-L-serine
  SITE 16: note = L-ornithine
  SITE 17: note = Lysine is chemically modified through conjugation of the epsilon-amino group of the Lysine side chain with (gamma-Glu)2-CO-(CH2)16-CO2H
  SITE 20: note = 2-Aminoisobutyric Acid
  SITE 21: note = L-ornithine
  SITE 24: note = D-amino acid
  SITE 25: note = alpha-methyl-L-tyrosine
  SITE 43: note = Amidated residue
YXQGTXTSDXXILLDXKAQXXFIEXLQEGGPSSGEPPPSGAEE

SEQ ID NO: 582 - protein, 43 aa, synthetic construct
  SITE 2: note = 2-Aminoisobutyric Acid
  SITE 6: note = alpha-methyl-2-fluoro-L-phenylalanine
  SITE 10: note = 3-(4-Pyridyl)-L-alanine
  SITE 11: note = alpha-methyl-L-serine
  SITE 16: note = L-ornithine
  SITE 17: note = Lysine is chemically modified through conjugation of the epsilon-amino group of the Lysine side chain with (gamma-Glu)2-CO-(CH2)16-CO2H
  SITE 20: note = 2-Aminoisobutyric Acid
  SITE 21: note = L-ornithine
  SITE 24: note = D-amino acid
  SITE 43: note = Amidated residue
YXQGTXTSDXXILLDXKAQXXFIEYLIEGGPSSGEPPPSGTEE

SEQ ID NO: 583 - protein, 44 aa, synthetic construct
  SITE 2: note = 2-Aminoisobutyric Acid
  SITE 6: note = alpha-methyl-2-fluoro-L-phenylalanine
  SITE 10: note = 3-(4-Pyridyl)-L-alanine
  SITE 11: note = alpha-methyl-L-serine
  SITE 16: note = L-ornithine
  SITE 17: note = Lysine is chemically modified through conjugation of the epsilon-amino group of the Lysine side chain with (gamma-Glu)2-CO-(CH2)16-CO2H
  SITE 20: note = 2-Aminoisobutyric Acid
  SITE 21: note = L-ornithine
  SITE 24: note = D-amino acid
  SITE 44: note = Amidated residue
YXQGTXTSDXXILLDXKAQXXFIEYLIEGGPSSGEPPPEGTEEE

SEQ ID NO: 584 - protein, 43 aa, synthetic construct
  SITE 2: note = 2-Aminoisobutyric Acid
  SITE 6: note = alpha-methyl-2-fluoro-L-phenylalanine
  SITE 10: note = 3-(4-Pyridyl)-L-alanine
  SITE 17: note = Lysine is chemically modified through conjugation of the epsilon-amino group of the Lysine side chain with (gamma-Glu)2-CO-(CH2)16-CO2H
  SITE 20: note = 2-Aminoisobutyric Acid
  SITE 43: note = Amidated residue
YXQGTXTSDXSILLDKKAQXAFIEWLQEGGPSSGAPPPSGTEE

SEQ ID NO: 585 - protein, 43 aa, synthetic construct
  SITE 2: note = 2-Aminoisobutyric Acid
  SITE 6: note = alpha-methyl-2-fluoro-L-phenylalanine
  SITE 10: note = 3-(4-Pyridyl)-L-alanine
  SITE 17: note = Lysine is chemically modified through conjugation of the epsilon-amino group of the Lysine side chain with (gamma-Glu)2-CO-(CH2)16-CO2H
  SITE 20: note = 2-Aminoisobutyric Acid
  SITE 43: note = Amidated residue
YXQGTXTSDXSILLDKKAQXAFIEWLQEGGPSSGEPPPSGTEE

SEQ ID NO: 586 - protein, 43 aa, synthetic construct
  SITE 2: note = 2-Aminoisobutyric Acid
  SITE 6: note = alpha-methyl-2-fluoro-L-phenylalanine
  SITE 10: note = 3-(4-Pyridyl)-L-alanine
  SITE 17: note = Lysine is chemically modified through conjugation of the epsilon-amino group of the Lysine side chain with (gamma-Glu)2-CO-(CH2)16-CO2H
  SITE 20: note = 2-Aminoisobutyric Acid
  SITE 43: note = Amidated residue
YXQGTXTSDXSILLDKKAQXAFIEYLQEGGPSSGAPPPSGTEE

SEQ ID NO: 587 - protein, 43 aa, synthetic construct
  SITE 2: note = 2-Aminoisobutyric Acid
  SITE 6: note = alpha-methyl-2-fluoro-L-phenylalanine
  SITE 10: note = 3-(4-Pyridyl)-L-alanine
  SITE 16: note = L-ornithine
  SITE 17: note = Lysine is chemically modified through conjugation of the epsilon-amino group of the Lysine side chain with (gamma-Glu)2-CO-(CH2)16-CO2H
  SITE 20: note = 2-Aminoisobutyric Acid
  SITE 43: note = Amidated residue
YXQGTXTSDXSILLDXKAQXAFIEYLQEGGPSSGAPPPSGTEE

SEQ ID NO: 588 - protein, 43 aa, synthetic construct
  SITE 2: note = 2-Aminoisobutyric Acid
  SITE 6: note = alpha-methyl-2-fluoro-L-phenylalanine
  SITE 10: note = 3-(4-Pyridyl)-L-alanine
  SITE 16: note = L-ornithine
  SITE 17: note = Lysine is chemically modified through conjugation of the epsilon-amino group of the Lysine side chain with (gamma-Glu)2-CO-(CH2)16-CO2H
  SITE 20: note = 2-Aminoisobutyric Acid
  SITE 21: note = L-ornithine
  SITE 43: note = Amidated residue
YXQGTXTSDXSILLDXKAQXXFIEYLQEGGPSSGAPPPSGTEE

SEQ ID NO: 589 - protein, 43 aa, synthetic construct
  SITE 2: note = 2-Aminoisobutyric Acid
  SITE 6: note = alpha-methyl-2-fluoro-L-phenylalanine
  SITE 10: note = 3-(4-Pyridyl)-L-alanine
  SITE 16: note = L-ornithine
  SITE 17: note = Lysine is chemically modified through conjugation of the epsilon-amino group of the Lysine side chain with (gamma-Glu)2-CO-(CH2)16-CO2H
  SITE 20: note = 2-Aminoisobutyric Acid
  SITE 43: note = Amidated residue
YXQGTXTSDXSILLDXKAQXAFIEYLQEGGPSSGEPPPSGTEE

SEQ ID NO: 590 - protein, 43 aa, synthetic construct
  SITE 2: note = 2-Aminoisobutyric Acid
  SITE 6: note = alpha-methyl-2-fluoro-L-phenylalanine
  SITE 10: note = 3-(4-Pyridyl)-L-alanine
  SITE 16: note = L-ornithine
  SITE 17: note = Lysine is chemically modified through conjugation of the epsilon-amino group of the Lysine side chain with (gamma-Glu)2-CO-(CH2)16-CO2H
  SITE 20: note = 3-(4-Pyridyl)-L-alanine
  SITE 21: note = L-ornithine
  SITE 24: note = D-amino acid
  SITE 43: note = Amidated residue
YXQGTXTSDXSILLDXKAQXXFIEYLIEGGPSSGEPPPSGTEE

SEQ ID NO: 591 - protein, 43 aa, synthetic construct
  SITE 2: note = 2-Aminoisobutyric Acid
  SITE 6: note = alpha-methyl-2-fluoro-L-phenylalanine
  SITE 10: note = 3-(4-Pyridyl)-L-alanine
  SITE 11: note = alpha-methyl-L-serine
  SITE 13: note = alpha-methyl-leucine
  SITE 16: note = L-ornithine
  SITE 17: note = Lysine is chemically modified through conjugation of the epsilon-amino group of the Lysine side chain with (gamma-Glu)2-CO-(CH2)16-CO2H
  SITE 20: note = 2-Aminoisobutyric Acid
  SITE 21: note = L-ornithine
  SITE 24: note = D-amino acid
  SITE 25: note = alpha-methyl-L-tyrosine
  SITE 43: note = Amidated residue
YXQGTXTSDXXIXLDXKAQXXFIEXLQEGGPSSGEPPPEGSEE

SEQ ID NO: 592 - protein, 43 aa, synthetic construct
  SITE 2: note = 2-Aminoisobutyric Acid
  SITE 6: note = alpha-methyl-2-fluoro-L-phenylalanine
  SITE 10: note = 3-(4-Pyridyl)-L-alanine
  SITE 11: note = alpha-methyl-L-serine
  SITE 13: note = alpha-methyl-leucine
  SITE 16: note = L-ornithine
  SITE 17: note = Lysine is chemically modified through conjugation of the epsilon-amino group of the Lysine side chain with (gamma-Glu)2-CO-(CH2)16-CO2H
  SITE 20: note = 2-Aminoisobutyric Acid
  SITE 21: note = L-ornithine
  SITE 24: note = D-amino acid
  SITE 25: note = alpha-methyl-L-tyrosine
  SITE 43: note = Amidated residue
YXQGTXTSDXXIXLDXKAQXXFIEXLQEGGPSSGEPPPEGGEE

SEQ ID NO: 593 - protein, 43 aa, synthetic construct
  SITE 2: note = 2-Aminoisobutyric Acid
  SITE 6: note = alpha-methyl-2-fluoro-L-phenylalanine
  SITE 10: note = 3-(4-Pyridyl)-L-alanine
  SITE 11: note = alpha-methyl-L-serine
  SITE 13: note = alpha-methyl-leucine
  SITE 16: note = L-ornithine
  SITE 17: note = Lysine is chemically modified through conjugation of the epsilon-amino group of the Lysine side chain with (gamma-Glu)2-CO-(CH2)16-CO2H
  SITE 20: note = 2-Aminoisobutyric Acid
  SITE 21: note = L-ornithine
  SITE 24: note = D-amino acid
  SITE 25: note = alpha-methyl-L-tyrosine
  SITE 43: note = Amidated residue
YXQGTXTSDXXIXLDXKAQXXFIEXLQEGGPSSGEPPPEGAEE

SEQ ID NO: 594 - protein, 43 aa, synthetic construct
  SITE 2: note = 2-Aminoisobutyric Acid
  SITE 6: note = alpha-methyl-2-fluoro-L-phenylalanine
  SITE 10: note = 3-(4-Pyridyl)-L-alanine
  SITE 11: note = alpha-methyl-L-serine
  SITE 13: note = alpha-methyl-leucine
  SITE 16: note = L-ornithine
  SITE 17: note = Lysine is chemically modified through conjugation of the epsilon-amino group of the Lysine side chain with (gamma-Glu)2-CO-(CH2)16-CO2H
  SITE 20: note = 2-Aminoisobutyric Acid
  SITE 21: note = L-ornithine
  SITE 24: note = D-amino acid
  SITE 25: note = alpha-methyl-L-tyrosine
  SITE 43: note = Amidated residue
YXQGTXTSDXXIXLDXKAQXXFIEXLQEGGPSSGEPPPEGEEE

SEQ ID NO: 595 - protein, 43 aa, synthetic construct
  SITE 2: note = 2-Aminoisobutyric Acid
  SITE 6: note = alpha-methyl-2-fluoro-L-phenylalanine
  SITE 10: note = 3-(4-Pyridyl)-L-alanine
  SITE 11: note = alpha-methyl-L-serine
  SITE 13: note = alpha-methyl-leucine
  SITE 16: note = L-ornithine
  SITE 17: note = Lysine is chemically modified through conjugation of the epsilon-amino group of the Lysine side chain with (gamma-Glu)2-CO-(CH2)16-CO2H
  SITE 20: note = 2-Aminoisobutyric Acid
  SITE 21: note = L-ornithine
  SITE 24: note = D-amino acid
  SITE 25: note = alpha-methyl-L-tyrosine
  SITE 43: note = Amidated residue
YXQGTXTSDXXIXLDXKAQXXFIEXLAEGGPSSGEPPPSGSEE

SEQ ID NO: 596 - protein, 43 aa, synthetic construct
  SITE 2: note = 2-Aminoisobutyric Acid
  SITE 6: note = alpha-methyl-2-fluoro-L-phenylalanine
  SITE 10: note = 3-(4-Pyridyl)-L-alanine
  SITE 11: note = alpha-methyl-L-serine
  SITE 13: note = alpha-methyl-leucine
  SITE 16: note = L-ornithine
  SITE 17: note = Lysine is chemically modified through conjugation of the epsilon-amino group of the Lysine side chain with (gamma-Glu)2-CO-(CH2)16-CO2H
  SITE 20: note = 2-Aminoisobutyric Acid
  SITE 21: note = L-ornithine
  SITE 24: note = D-amino acid
  SITE 25: note = alpha-methyl-L-tyrosine
  SITE 43: note = Amidated residue
YXQGTXTSDXXIXLDXKAQXXFIEXLAEGGPSSGEPPPSGGEE

SEQ ID NO: 597 - protein, 43 aa, synthetic construct
  SITE 2: note = 2-Aminoisobutyric Acid
  SITE 6: note = alpha-methyl-2-fluoro-L-phenylalanine
  SITE 10: note = 3-(4-Pyridyl)-L-alanine
  SITE 11: note = alpha-methyl-L-serine
  SITE 13: note = alpha-methyl-leucine
  SITE 16: note = L-ornithine
  SITE 17: note = Lysine is chemically modified through conjugation of the epsilon-amino group of the Lysine side chain with (gamma-Glu)2-CO-(CH2)16-CO2H
  SITE 20: note = 2-Aminoisobutyric Acid
  SITE 21: note = L-ornithine
  SITE 24: note = D-amino acid
  SITE 25: note = alpha-methyl-L-tyrosine
  SITE 43: note = Amidated residue
YXQGTXTSDXXIXLDXKAQXXFIEXLAEGGPSSGEPPPSGAEE

SEQ ID NO: 598 - protein, 43 aa, synthetic construct
  SITE 2: note = 2-Aminoisobutyric Acid
  SITE 6: note = alpha-methyl-2-fluoro-L-phenylalanine
  SITE 10: note = 3-(4-Pyridyl)-L-alanine
  SITE 11: note = alpha-methyl-L-serine
  SITE 13: note = alpha-methyl-leucine
  SITE 16: note = L-ornithine
  SITE 17: note = Lysine is chemically modified through conjugation of the epsilon-amino group of the Lysine side chain with (gamma-Glu)2-CO-(CH2)16-CO2H
  SITE 20: note = 2-Aminoisobutyric Acid
  SITE 21: note = L-ornithine
  SITE 24: note = D-amino acid
  SITE 25: note = alpha-methyl-L-tyrosine
  SITE 43: note = Amidated residue
YXQGTXTSDXXIXLDXKAQXXFIEXLAEGGPSSGEPPPSGEEE

SEQ ID NO: 599 - protein, 43 aa, synthetic construct; identical to SEQ ID NO: 563
  SITE 2: note = 2-Aminoisobutyric Acid
  SITE 6: note = alpha-methyl-2-fluoro-L-phenylalanine
  SITE 10: note = 3-(4-Pyridyl)-L-alanine
  SITE 11: note = alpha-methyl-L-serine
  SITE 13: note = alpha-methyl-leucine
  SITE 16: note = L-ornithine
  SITE 17: note = Lysine is chemically modified through conjugation of the epsilon-amino group of the Lysine side chain with (Glu)-(gamma-Glu)-CO-(CH2)16-CO2H
  SITE 20: note = 2-Aminoisobutyric Acid
  SITE 21: note = L-ornithine
  SITE 24: note = D-amino acid
  SITE 25: note = alpha-methyl-L-tyrosine
  SITE 43: note = Amidated residue

SEQ ID NO: 600 - protein, 44 aa, synthetic construct; identical to SEQ ID NO: 564
  SITE 2: note = 2-Aminoisobutyric Acid
  SITE 6: note = alpha-methyl-2-fluoro-L-phenylalanine
  SITE 10: note = 3-(4-Pyridyl)-L-alanine
  SITE 11: note = alpha-methyl-L-serine
  SITE 13: note = alpha-methyl-leucine
  SITE 16: note = L-ornithine
  SITE 17: note = Lysine is chemically modified through conjugation of the epsilon-amino group of the Lysine side chain with (Glu)-(gamma-Glu)-CO-(CH2)16-CO2H
  SITE 20: note = 2-Aminoisobutyric Acid
  SITE 21: note = L-ornithine
  SITE 24: note = D-amino acid
  SITE 25: note = alpha-methyl-L-tyrosine
  SITE 44: note = Amidated residue

SEQ ID NO: 601 - protein, 43 aa, synthetic construct; identical to SEQ ID NO: 563
  SITE 2: note = 2-Aminoisobutyric Acid
  SITE 6: note = alpha-methyl-2-fluoro-L-phenylalanine
  SITE 10: note = 3-(4-Pyridyl)-L-alanine
  SITE 11: note = alpha-methyl-L-serine
  SITE 13: note = alpha-methyl-leucine
  SITE 16: note = L-ornithine
  SITE 17: note = Lysine is chemically modified through conjugation of the epsilon-amino group of the Lysine side chain with D-Glutamic acid-(gamma-Glu)-CO-(CH2)16-CO2H
  SITE 20: note = 2-Aminoisobutyric Acid
  SITE 21: note = L-ornithine
  SITE 24: note = D-amino acid
  SITE 25: note = alpha-methyl-L-tyrosine
  SITE 43: note = Amidated residue

SEQ ID NO: 602 - protein, 44 aa, synthetic construct; identical to SEQ ID NO: 564
  SITE 2: note = 2-Aminoisobutyric Acid
  SITE 6: note = alpha-methyl-2-fluoro-L-phenylalanine
  SITE 10: note = 3-(4-Pyridyl)-L-alanine
  SITE 11: note = alpha-methyl-L-serine
  SITE 13: note = alpha-methyl-leucine
  SITE 16: note = L-ornithine
  SITE 17: note = Lysine is chemically modified through conjugation of the epsilon-amino group of the Lysine side chain with D-Glutamic acid-(gamma-Glu)-CO-(CH2)16-CO2H
  SITE 20: note = 2-Aminoisobutyric Acid
  SITE 21: note = L-ornithine
  SITE 24: note = D-amino acid
  SITE 25: note = alpha-methyl-L-tyrosine
  SITE 44: note = Amidated residue

SEQ ID NO: 603 - protein, 43 aa, synthetic construct
  SITE 2: note = 2-Aminoisobutyric Acid
  SITE 6: note = alpha-methyl-2-fluoro-L-phenylalanine
  SITE 10: note = 3-(4-Pyridyl)-L-alanine
  SITE 11: note = alpha-methyl-L-serine
  SITE 13: note = alpha-methyl-leucine
  SITE 16: note = L-ornithine
  SITE 17: note = Lysine is chemically modified through conjugation of the epsilon-amino group of the Lysine side chain with (gamma-Glu)2-CO-(CH2)16-CO2H
  SITE 20: note = 2-Aminoisobutyric Acid
  SITE 21: note = L-ornithine
  SITE 24: note = D-amino acid
  SITE 25: note = alpha-methyl-L-tyrosine
  SITE 43: note = Amidated residue
YXQGTXTSDXXIXLDXKAQXXFIEXLTEGGPSSGEPPPEGTEE

SEQ ID NO: 604 - protein, 44 aa, synthetic construct
  SITE 2: note = 2-Aminoisobutyric Acid
  SITE 6: note = alpha-methyl-2-fluoro-L-phenylalanine
  SITE 10: note = 3-(4-Pyridyl)-L-alanine
  SITE 11: note = alpha-methyl-L-serine
  SITE 13: note = alpha-methyl-leucine
  SITE 16: note = L-ornithine
  SITE 17: note = Lysine is chemically modified through conjugation of the epsilon-amino group of the Lysine side chain with (gamma-Glu)2-CO-(CH2)16-CO2H
  SITE 20: note = 2-Aminoisobutyric Acid
  SITE 21: note = L-ornithine
  SITE 24: note = D-amino acid
  SITE 25: note = alpha-methyl-L-tyrosine
  SITE 44: note = Amidated residue
YXQGTXTSDXXIXLDXKAQXXFIEXLTEGGPSSGEPPPEGTEEE

SEQ ID NO: 605 - protein, 43 aa, synthetic construct; identical to SEQ ID NO: 563
  SITE 2: note = 2-Aminoisobutyric Acid
  SITE 6: note = alpha-methyl-2-fluoro-L-phenylalanine
  SITE 10: note = 3-(4-Pyridyl)-L-alanine
  SITE 11: note = alpha-methyl-L-serine
  SITE 13: note = alpha-methyl-leucine
  SITE 16: note = L-ornithine
  SITE 17: note = Lysine is chemically modified through conjugation of the epsilon-amino group of the Lysine side chain with (gamma-Glu)2-CO-(CH2)16-CO2H
  SITE 20: note = 2-Aminoisobutyric Acid
  SITE 21: note = L-ornithine
  SITE 24: note = D-amino acid
  SITE 25: note = alpha-methyl-L-tyrosine
  SITE 43: note = Amidated residue

SEQ ID NO: 606 - protein, 44 aa, synthetic construct; identical to SEQ ID NO: 564
  SITE 2: note = 2-Aminoisobutyric Acid
  SITE 6: note = alpha-methyl-2-fluoro-L-phenylalanine
  SITE 10: note = 3-(4-Pyridyl)-L-alanine
  SITE 11: note = alpha-methyl-L-serine
  SITE 13: note = alpha-methyl-leucine
  SITE 16: note = L-ornithine
  SITE 17: note = Lysine is chemically modified through conjugation of the epsilon-amino group of the Lysine side chain with (gamma-Glu)2-CO-(CH2)16-CO2H
  SITE 20: note = 2-Aminoisobutyric Acid
  SITE 21: note = L-ornithine
  SITE 24: note = D-amino acid
  SITE 25: note = alpha-methyl-L-tyrosine
  SITE 44: note = Amidated residue

SEQ ID NO: 607 - protein, 43 aa, synthetic construct; identical to SEQ ID NO: 563
  SITE 2: note = 2-Aminoisobutyric Acid
  SITE 6: note = alpha-methyl-2-fluoro-L-phenylalanine
  SITE 10: note = 3-(4-Pyridyl)-L-alanine
  SITE 11: note = alpha-methyl-L-serine
  SITE 13: note = alpha-methyl-leucine
  SITE 16: note = L-ornithine
  SITE 17: note = Lysine is chemically modified through conjugation of the epsilon-amino group of the Lysine side chain with (gamma-Glu)2-CO-(CH2)16-CO2H
  SITE 20: note = 2-Aminoisobutyric Acid
  SITE 21: note = L-ornithine
  SITE 24: note = D-amino acid
  SITE 25: note = alpha-methyl-L-tyrosine

SEQ ID NO: 608 - protein, 43 aa, synthetic construct; identical to SEQ ID NO: 563
  SITE 2: note = 2-Aminoisobutyric Acid
  SITE 6: note = alpha-methyl-2-fluoro-L-phenylalanine
  SITE 10: note = 3-(4-Pyridyl)-L-alanine
  SITE 11: note = alpha-methyl-L-serine
  SITE 13: note = alpha-methyl-leucine
  SITE 16: note = L-ornithine
  SITE 17: note = Lysine is chemically modified through conjugation of the epsilon-amino group of the Lysine side chain with (gamma-Glu)2-CO-(CH2)16-CO2H
  SITE 20: note = 2-Aminoisobutyric Acid
  SITE 21: note = L-ornithine
  SITE 24: note = D-amino acid
  SITE 25: note = alpha-methyl-L-tyrosine

SEQ ID NO: 609 - protein, 43 aa, synthetic construct
  SITE 2: note = 2-Aminoisobutyric Acid
  SITE 6: note = alpha-methyl-2-fluoro-L-phenylalanine
  SITE 10: note = 3-(4-Pyridyl)-L-alanine
  SITE 11: note = alpha-methyl-L-serine
  SITE 16: note = L-ornithine
  SITE 17: note = Lysine is chemically modified through conjugation of the epsilon-amino group of the Lysine side chain with (gamma-Glu)2-CO-(CH2)16-CO2H
  SITE 20: note = 2-Aminoisobutyric Acid
  SITE 21: note = L-ornithine
  SITE 24: note = D-amino acid
  SITE 43: note = Amidated residue
YXQGTXTSDXXILLDXKAQXXFIEYLIEGGPSSGEPPPEGSEE

SEQ ID NO: 610 - protein, 43 aa, synthetic construct
  SITE 2: note = 2-Aminoisobutyric Acid
  SITE 6: note = alpha-methyl-2-fluoro-L-phenylalanine
  SITE 10: note = 3-(4-Pyridyl)-L-alanine
  SITE 11: note = alpha-methyl-L-serine
  SITE 16: note = L-ornithine
  SITE 17: note = Lysine is chemically modified through conjugation of the epsilon-amino group of the Lysine side chain with (gamma-Glu)2-CO-(CH2)16-CO2H
  SITE 20: note = 2-Aminoisobutyric Acid
  SITE 21: note = L-ornithine
  SITE 24: note = D-amino acid
  SITE 43: note = Amidated residue
YXQGTXTSDXXILLDXKAQXXFIEYLIEGGPSSGEPPPEGAEE

SEQ ID NO: 611 - protein, 43 aa, synthetic construct
  SITE 2: note = 2-Aminoisobutyric Acid
  SITE 6: note = alpha-methyl-2-fluoro-L-phenylalanine
  SITE 10: note = 3-(4-Pyridyl)-L-alanine
  SITE 11: note = alpha-methyl-L-serine
  SITE 16: note = L-ornithine
  SITE 17: note = Lysine is chemically modified through conjugation of the epsilon-amino group of the Lysine side chain with (gamma-Glu)2-CO-(CH2)16-CO2H
  SITE 20: note = 2-Aminoisobutyric Acid
  SITE 21: note = L-ornithine
  SITE 24: note = D-amino acid
  SITE 43: note = Amidated residue
YXQGTXTSDXXILLDXKAQXXFIEYLIEGGPSSGEPPPEGGEE

SEQ ID NO: 612 - protein, 43 aa, synthetic construct
  SITE 2: note = 2-Aminoisobutyric Acid
  SITE 6: note = alpha-methyl-2-fluoro-L-phenylalanine
  SITE 10: note = 3-(4-Pyridyl)-L-alanine
  SITE 11: note = alpha-methyl-L-serine
  SITE 16: note = L-ornithine
  SITE 17: note = Lysine is chemically modified through conjugation of the epsilon-amino group of the Lysine side chain with (gamma-Glu)2-CO-(CH2)16-CO2H
  SITE 20: note = 2-Aminoisobutyric Acid
  SITE 21: note = L-ornithine
  SITE 24: note = D-amino acid
  SITE 43: note = Amidated residue
YXQGTXTSDXXILLDXKAQXXFIEYLIEGGPSSGEPPPEGEEE

SEQ ID NO: 613 - protein, 43 aa, synthetic construct
  SITE 2: note = 2-Aminoisobutyric Acid
  SITE 6: note = alpha-methyl-2-fluoro-L-phenylalanine
  SITE 10: note = 3-(4-Pyridyl)-L-alanine
  SITE 17: note = Lysine is chemically modified through conjugation of the epsilon-amino group of the Lysine side chain with (gamma-Glu)2-CO-(CH2)16-CO2H
  SITE 20: note = 2-Aminoisobutyric Acid
  SITE 43: note = Amidated residue
YXQGTXTSDXSILLDKKAQXAFIEYLEEGGPSSGEPPPSGTGE

SEQ ID NO: 614 - protein, 43 aa, synthetic construct
  SITE 2: note = 2-Aminoisobutyric Acid
  SITE 6: note = alpha-methyl-2-fluoro-L-phenylalanine
  SITE 10: note = 3-(4-Pyridyl)-L-alanine
  SITE 17: note = Lysine is chemically modified through conjugation of the epsilon-amino group of the Lysine side chain with (gamma-Glu)2-CO-(CH2)16-CO2H
  SITE 20: note = 2-Aminoisobutyric Acid
  SITE 43: note = Amidated residue
YXQGTXTSDXSILLDKKAQXAFIEYLEEGGPSSGEPPPSGTEE

SEQ ID NO: 615 - protein, 43 aa, synthetic construct
  SITE 2: note = 2-Aminoisobutyric Acid
  SITE 6: note = alpha-methyl-2-fluoro-L-phenylalanine
  SITE 10: note = 3-(4-Pyridyl)-L-alanine
  SITE 17: note = Lysine is chemically modified through conjugation of the epsilon-amino group of the Lysine side chain with (gamma-Glu)2-CO-(CH2)16-CO2H
  SITE 20: note = 2-Aminoisobutyric Acid
  SITE 43: note = Amidated residue
YXQGTXTSDXSILLDKKAQXAFIEYLEEGGPSSGAPPPSGTEE

SEQ ID NO: 616 - protein, 43 aa, synthetic construct
  SITE 2: note = 2-Aminoisobutyric Acid
  SITE 6: note = alpha-methyl-2-fluoro-L-phenylalanine
  SITE 10: note = 3-(4-Pyridyl)-L-alanine
  SITE 17: note = Lysine is chemically modified through conjugation of the epsilon-amino group of the Lysine side chain with (gamma-Glu)2-CO-(CH2)16-CO2H
  SITE 20: note = 2-Aminoisobutyric Acid
  SITE 43: note = Amidated residue
YXQGTXTSDXSILLDKKAQXAFIEYLEEGGPSSGAPPPSGSEE

SEQ ID NO: 617 - protein, 43 aa, synthetic construct
  SITE 2: note = 2-Aminoisobutyric Acid
  SITE 6: note = alpha-methyl-2-fluoro-L-phenylalanine
  SITE 10: note = 3-(4-Pyridyl)-L-alanine
  SITE 17: note = Lysine is chemically modified through conjugation of the epsilon-amino group of the Lysine side chain with (gamma-Glu)2-CO-(CH2)16-CO2H
  SITE 20: note = 2-Aminoisobutyric Acid
  SITE 43: note = Amidated residue
YXQGTXTSDXSILLDKKAQXAFIEYLEEGGPSSGAPPPSGEEE

SEQ ID NO: 618 - protein, 43 aa, synthetic construct
  SITE 2: note = 2-Aminoisobutyric Acid
  SITE 6: note = alpha-methyl-2-fluoro-L-phenylalanine
  SITE 10: note = 3-(4-Pyridyl)-L-alanine
  SITE 17: note = Lysine is chemically modified through conjugation of the epsilon-amino group of the Lysine side chain with (gamma-Glu)2-CO-(CH2)16-CO2H
  SITE 20: note = 2-Aminoisobutyric Acid
  SITE 43: note = Amidated residue
YXQGTXTSDXSILLDKKAQXAFIEYLEEGGPSSGAPPPSGGEE

SEQ ID NO: 619 - protein, 41 aa, synthetic construct
  SITE 2: note = 2-Aminoisobutyric Acid
  SITE 6: note = alpha-methyl-2-fluoro-L-phenylalanine
  SITE 10: note = 3-(4-Pyridyl)-L-alanine
  SITE 13: note = alpha-methyl-leucine
  SITE 16: note = L-ornithine
  SITE 17: note = Lysine is chemically modified through conjugation of the epsilon-amino group of the Lysine side chain with (2-[2-(2-Amino-ethoxy)-ethoxy]-acetyl)2-(gamma-Glu)-CO-(CH2 )16-CO2H
  SITE 20: note = 3-(4-Pyridyl)-L-alanine
  SITE 24: note = D-amino acid
  SITE 25: note = alpha-methyl-L-tyrosine
  SITE 41: note = Amidated residue
YXQGTXTSDXSIXLDXKAQXEFIEXLLEGGPSSGAPPPSGE

SEQ ID NO: 620 - protein, 41 aa, synthetic construct
  SITE 2: note = 2-Aminoisobutyric Acid
  SITE 6: note = alpha-methyl-2-fluoro-L-phenylalanine
  SITE 10: note = 3-(4-Pyridyl)-L-alanine
  SITE 13: note = alpha-methyl-leucine
  SITE 16: note = L-ornithine
  SITE 17: note = Lysine is chemically modified through conjugation of the epsilon-amino group of the Lysine side chain with (2-[2-(2-Amino-ethoxy)-ethoxy]-acetyl)-(gamma-Glu)-CO-(CH2) 16-CO2H
  SITE 20: note = 3-(4-Pyridyl)-L-alanine
  SITE 24: note = D-amino acid
  SITE 25: note = alpha-methyl-L-tyrosine
  SITE 41: note = Amidated residue
YXQGTXTSDXSIXLDXKAQXEFIEXLIEGGPSSGAPPPSGE

SEQ ID NO: 621 - protein, 41 aa, synthetic construct; identical to SEQ ID NO: 619
  SITE 2: note = 2-Aminoisobutyric Acid
  SITE 6: note = alpha-methyl-2-fluoro-L-phenylalanine
  SITE 10: note = 3-(4-Pyridyl)-L-alanine
  SITE 13: note = alpha-methyl-leucine
  SITE 16: note = L-ornithine
  SITE 17: note = Lysine is chemically modified through conjugation of the epsilon-amino group of the Lysine side chain with (2-[2-(2-Amino-ethoxy)-ethoxy]-acetyl)-(gamma-Glu)-CO-(CH2) 16-CO2H
  SITE 20: note = 3-(4-Pyridyl)-L-alanine
  SITE 24: note = D-amino acid
  SITE 25: note = alpha-methyl-L-tyrosine
  SITE 41: note = Amidated residue

SEQ ID NO: 622 - protein, 41 aa, synthetic construct; identical to SEQ ID NO: 620
  SITE 2: note = 2-Aminoisobutyric Acid
  SITE 6: note = alpha-methyl-2-fluoro-L-phenylalanine
  SITE 10: note = 3-(4-Pyridyl)-L-alanine
  SITE 13: note = alpha-methyl-leucine
  SITE 16: note = L-ornithine
  SITE 17: note = Lysine is chemically modified through conjugation of the epsilon-amino group of the Lysine side chain with (gamma-Glu)2-CO-(CH2)16-CO2H
  SITE 20: note = 3-(4-Pyridyl)-L-alanine
  SITE 24: note = D-amino acid
  SITE 25: note = alpha-methyl-L-tyrosine
  SITE 41: note = Amidated residue

SEQ ID NO: 623 - protein, 41 aa, synthetic construct; identical to SEQ ID NO: 619
  SITE 2: note = 2-Aminoisobutyric Acid
  SITE 6: note = alpha-methyl-2-fluoro-L-phenylalanine
  SITE 10: note = 3-(4-Pyridyl)-L-alanine
  SITE 13: note = alpha-methyl-leucine
  SITE 16: note = L-ornithine
  SITE 17: note = Lysine is chemically modified through conjugation of the epsilon-amino group of the Lysine side chain with (gamma-Glu)2-CO-(CH2)16-CO2H
  SITE 20: note = 3-(4-Pyridyl)-L-alanine
  SITE 24: note = D-amino acid
  SITE 25: note = alpha-methyl-L-tyrosine
  SITE 41: note = Amidated residue

SEQ ID NO: 624 - protein, 43 aa, synthetic construct
  SITE 2: note = 2-Aminoisobutyric Acid
  SITE 6: note = alpha-methyl-2-fluoro-L-phenylalanine
  SITE 10: note = 3-(4-Pyridyl)-L-alanine
  SITE 17: note = Lysine is chemically modified through conjugation of the epsilon-amino group of the Lysine side chain with (gamma-Glu)2-CO-(CH2)16-CO2H
  SITE 20: note = 2-Aminoisobutyric Acid
  SITE 43: note = Amidated residue
YXQGTXTSDXSILLDKKAQXAFIEYLEEGGPSSGAPPPSGSGE

SEQ ID NO: 625 - protein, 43 aa, synthetic construct
  SITE 2: note = 2-Aminoisobutyric Acid
  SITE 6: note = alpha-methyl-2-fluoro-L-phenylalanine
  SITE 10: note = 3-(4-Pyridyl)-L-alanine
  SITE 17: note = Lysine is chemically modified through conjugation of the epsilon-amino group of the Lysine side chain with (gamma-Glu)2-CO-(CH2)16-CO2H
  SITE 20: note = 2-Aminoisobutyric Acid
  SITE 43: note = Amidated residue
YXQGTXTSDXSILLDKKAQXAFIEYLEEGGPSSGAPPPSGGGE

SEQ ID NO: 626 - protein, 43 aa, synthetic construct
  SITE 2: note = 2-Aminoisobutyric Acid
  SITE 6: note = alpha-methyl-2-fluoro-L-phenylalanine
  SITE 10: note = 3-(4-Pyridyl)-L-alanine
  SITE 17: note = Lysine is chemically modified through conjugation of the epsilon-amino group of the Lysine side chain with (gamma-Glu)2-CO-(CH2)16-CO2H
  SITE 20: note = 2-Aminoisobutyric Acid
  SITE 43: note = Amidated residue
YXQGTXTSDXSILLDKKAQXAFIEYLEEGGPSSGAPPPSGAGE

SEQ ID NO: 627 - protein, 43 aa, synthetic construct
  SITE 2: note = 2-Aminoisobutyric Acid
  SITE 6: note = alpha-methyl-2-fluoro-L-phenylalanine
  SITE 10: note = 3-(4-Pyridyl)-L-alanine
  SITE 17: note = Lysine is chemically modified through conjugation of the epsilon-amino group of the Lysine side chain with (gamma-Glu)2-CO-(CH2)16-CO2H
  SITE 20: note = 2-Aminoisobutyric Acid
  SITE 43: note = Amidated residue
YXQGTXTSDXSILLDKKAQXAFIEYLEEGGPSSGAPPPSGEGE

SEQ ID NO: 628 - protein, 43 aa, synthetic construct
  SITE 2: note = 2-Aminoisobutyric Acid
  SITE 6: note = alpha-methyl-2-fluoro-L-phenylalanine
  SITE 10: note = 3-(4-Pyridyl)-L-alanine
  SITE 13: note = alpha-methyl-leucine
  SITE 17: note = Lysine is chemically modified through conjugation of the epsilon-amino group of the Lysine side chain with (gamma-Glu)2-CO-(CH2)16-CO2H
  SITE 20: note = 2-Aminoisobutyric Acid
  SITE 43: note = Amidated residue
YXQGTXTSDXSIXLDKKAQXAFIEYLEEGGPSSGAPPPSGTGE

SEQ ID NO: 629 - protein, 43 aa, synthetic construct
  SITE 2: note = 2-Aminoisobutyric Acid
  SITE 6: note = alpha-methyl-2-fluoro-L-phenylalanine
  SITE 10: note = 3-(4-Pyridyl)-L-alanine
  SITE 13: note = alpha-methyl-leucine
  SITE 17: note = Lysine is chemically modified through conjugation of the epsilon-amino group of the Lysine side chain with (gamma-Glu)2-CO-(CH2)16-CO2H
  SITE 20: note = 2-Aminoisobutyric Acid
  SITE 43: note = Amidated residue
YXQGTXTSDXSIXLDKKAQXAFIEYLEEGGPSSGAPPPSGEGE

SEQ ID NO: 630 - protein, 43 aa, synthetic construct
  SITE 2: note = 2-Aminoisobutyric Acid
  SITE 6: note = alpha-methyl-2-fluoro-L-phenylalanine
  SITE 10: note = 3-(4-Pyridyl)-L-alanine
  SITE 13: note = alpha-methyl-leucine
  SITE 17: note = Lysine is chemically modified through conjugation of the epsilon-amino group of the Lysine side chain with (gamma-Glu)2-CO-(CH2)16-CO2H
  SITE 20: note = 2-Aminoisobutyric Acid
  SITE 43: note = Amidated residue
YXQGTXTSDXSIXLDKKAQXAFIEYLEEGGPSSGEPPPSGTGE

SEQ ID NO: 631 - protein, 43 aa, synthetic construct
  SITE 2: note = 2-Aminoisobutyric Acid
  SITE 6: note = alpha-methyl-2-fluoro-L-phenylalanine
  SITE 10: note = 3-(4-Pyridyl)-L-alanine
  SITE 13: note = alpha-methyl-leucine
  SITE 17: note = Lysine is chemically modified through conjugation of the epsilon-amino group of the Lysine side chain with (gamma-Glu)2-CO-(CH2)16-CO2H
  SITE 20: note = 2-Aminoisobutyric Acid
  SITE 43: note = Amidated residue
YXQGTXTSDXSIXLDKKAQXAFIEYLEEGGPSSGEPPPSGEGE

SEQ ID NO: 632 - protein, 43 aa, synthetic construct
  SITE 2: note = 2-Aminoisobutyric Acid
  SITE 6: note = alpha-methyl-2-fluoro-L-phenylalanine
  SITE 10: note = 3-(4-Pyridyl)-L-alanine
  SITE 13: note = alpha-methyl-leucine
  SITE 17: note = Lysine is chemically modified through conjugation of the epsilon-amino group of the Lysine side chain with (gamma-Glu)2-CO-(CH2)16-CO2H
  SITE 20: note = 2-Aminoisobutyric Acid
  SITE 43: note = Amidated residue
YXQGTXTSDXSIXLDKKAQXAFIEYLEEGGPSSGAPPPEGTGE

SEQ ID NO: 633 - protein, 43 aa, synthetic construct; identical to SEQ ID NO: 632
  SITE 2: note = 2-Aminoisobutyric Acid
  SITE 6: note = alpha-methyl-2-fluoro-L-phenylalanine
  SITE 10: note = 3-(4-Pyridyl)-L-alanine
  SITE 13: note = alpha-methyl-leucine
  SITE 17: note = Lysine is chemically modified through conjugation of the epsilon-amino group of the Lysine side chain with (gamma-Glu)2-CO-(CH2)16-CO2H
  SITE 20: note = 2-Aminoisobutyric Acid
  SITE 43: note = Amidated residue

SEQ ID NO: 634 - protein, 43 aa, synthetic construct
  SITE 2: note = 2-Aminoisobutyric Acid
  SITE 6: note = alpha-methyl-2-fluoro-L-phenylalanine
  SITE 10: note = 3-(4-Pyridyl)-L-alanine
  SITE 13: note = alpha-methyl-leucine
  SITE 17: note = Lysine is chemically modified through conjugation of the epsilon-amino group of the Lysine side chain with (gamma-Glu)2-CO-(CH2)16-CO2H
  SITE 20: note = 2-Aminoisobutyric Acid
  SITE 43: note = Amidated residue
YXQGTXTSDXSIXLDKKAQXAFIEYLEEGGPSSGEPPPEGTGE

SEQ ID NO: 635 - protein, 43 aa, synthetic construct; identical to SEQ ID NO: 634
  SITE 2: note = 2-Aminoisobutyric Acid
  SITE 6: note = alpha-methyl-2-fluoro-L-phenylalanine
  SITE 10: note = 3-(4-Pyridyl)-L-alanine
  SITE 13: note = alpha-methyl-leucine
  SITE 17: note = Lysine is chemically modified through conjugation of the epsilon-amino group of the Lysine side chain with (gamma-Glu)2-CO-(CH2)16-CO2H
  SITE 20: note = 2-Aminoisobutyric Acid
  SITE 43: note = Amidated residue

SEQ ID NO: 636 - protein, 43 aa, synthetic construct
  SITE 2: note = 2-Aminoisobutyric Acid
  SITE 6: note = alpha-methyl-2-fluoro-L-phenylalanine
  SITE 10: note = 3-(4-Pyridyl)-L-alanine
  SITE 13: note = alpha-methyl-leucine
  SITE 17: note = Lysine is chemically modified through conjugation of the epsilon-amino group of the Lysine side chain with (gamma-Glu)2-CO-(CH2)16-CO2H
  SITE 20: note = 2-Aminoisobutyric Acid
  SITE 43: note = Amidated residue
YXQGTXTSDXSIXLDKKAQXAFIEYLEEGGPSSGEPPPSGSEE

SEQ ID NO: 637 - protein, 43 aa, synthetic construct
  SITE 2: note = 2-Aminoisobutyric Acid
  SITE 6: note = alpha-methyl-2-fluoro-L-phenylalanine
  SITE 10: note = 3-(4-Pyridyl)-L-alanine
  SITE 13: note = alpha-methyl-leucine
  SITE 17: note = Lysine is chemically modified through conjugation of the epsilon-amino group of the Lysine side chain with (gamma-Glu)2-CO-(CH2)16-CO2H
  SITE 20: note = 2-Aminoisobutyric Acid
  SITE 43: note = Amidated residue
YXQGTXTSDXSIXLDKKAQXAFIEYLAEGGPSSGEPPPSGSEE

SEQ ID NO: 638 - protein, 43 aa, synthetic construct
  SITE 2: note = 2-Aminoisobutyric Acid
  SITE 6: note = alpha-methyl-2-fluoro-L-phenylalanine
  SITE 10: note = 3-(4-Pyridyl)-L-alanine
  SITE 13: note = alpha-methyl-leucine
  SITE 17: note = Lysine is chemically modified through conjugation of the epsilon-amino group of the Lysine side chain with (gamma-Glu)2-CO-(CH2)16-CO2H
  SITE 20: note = 2-Aminoisobutyric Acid
  SITE 43: note = Amidated residue
YXQGTXTSDXSIXLDKKAQXAFIEYLSEGGPSSGEPPPSGSEE

SEQ ID NO: 639 - protein, 43 aa, synthetic construct
  SITE 2: note = 2-Aminoisobutyric Acid
  SITE 6: note = alpha-methyl-2-fluoro-L-phenylalanine
  SITE 10: note = 3-(4-Pyridyl)-L-alanine
  SITE 13: note = alpha-methyl-leucine
  SITE 17: note = Lysine is chemically modified through conjugation of the epsilon-amino group of the Lysine side chain with (gamma-Glu)2-CO-(CH2)16-CO2H
  SITE 20: note = 2-Aminoisobutyric Acid
  SITE 43: note = Amidated residue
YXQGTXTSDXSIXLDKKAQXAFIEYLTEGGPSSGEPPPSGSEE

SEQ ID NO: 640 - protein, 43 aa, synthetic construct
  SITE 2: note = 2-Aminoisobutyric Acid
  SITE 6: note = alpha-methyl-2-fluoro-L-phenylalanine
  SITE 10: note = 3-(4-Pyridyl)-L-alanine
  SITE 13: note = alpha-methyl-leucine
  SITE 17: note = Lysine is chemically modified through conjugation of the epsilon-amino group of the Lysine side chain with (gamma-Glu)2-CO-(CH2)16-CO2H
  SITE 20: note = 2-Aminoisobutyric Acid
  SITE 43: note = Amidated residue
YXQGTXTSDXSIXLDKKAQXAFIEYLQEGGPSSGEPPPSGSEE

SEQ ID NO: 641 - protein, 43 aa, synthetic construct
  SITE 2: note = 2-Aminoisobutyric Acid
  SITE 6: note = alpha-methyl-2-fluoro-L-phenylalanine
  SITE 10: note = 3-(4-Pyridyl)-L-alanine
  SITE 13: note = alpha-methyl-leucine
  SITE 17: note = Lysine is chemically modified through conjugation of the epsilon-amino group of the Lysine side chain with (gamma-Glu)2-CO-(CH2)16-CO2H
  SITE 20: note = 2-Aminoisobutyric Acid
  SITE 21: note = L-ornithine
  SITE 43: note = Amidated residue
YXQGTXTSDXSIXLDKKAQXXFIEYLEEGGPSSGEPPPSGSEE

SEQ ID NO: 642 - protein, 43 aa, synthetic construct
  SITE 2: note = 2-Aminoisobutyric Acid
  SITE 6: note = alpha-methyl-2-fluoro-L-phenylalanine
  SITE 10: note = 3-(4-Pyridyl)-L-alanine
  SITE 13: note = alpha-methyl-leucine
  SITE 17: note = Lysine is chemically modified through conjugation of the epsilon-amino group of the Lysine side chain with (gamma-Glu)2-CO-(CH2)16-CO2H
  SITE 20: note = 2-Aminoisobutyric Acid
  SITE 21: note = L-ornithine
  SITE 43: note = Amidated residue
YXQGTXTSDXSIXLDKKAQXXFIEYLAEGGPSSGEPPPSGSEE

SEQ ID NO: 643 - protein, 43 aa, synthetic construct
  SITE 2: note = 2-Aminoisobutyric Acid
  SITE 6: note = alpha-methyl-2-fluoro-L-phenylalanine
  SITE 10: note = 3-(4-Pyridyl)-L-alanine
  SITE 13: note = alpha-methyl-leucine
  SITE 17: note = Lysine is chemically modified through conjugation of the epsilon-amino group of the Lysine side chain with (gamma-Glu)2-CO-(CH2)16-CO2H
  SITE 20: note = 2-Aminoisobutyric Acid
  SITE 21: note = L-ornithine
  SITE 43: note = Amidated residue
YXQGTXTSDXSIXLDKKAQXXFIEYLSEGGPSSGEPPPSGSEE

SEQ ID NO: 644 - protein, 43 aa, synthetic construct
  SITE 2: note = 2-Aminoisobutyric Acid
  SITE 6: note = alpha-methyl-2-fluoro-L-phenylalanine
  SITE 10: note = 3-(4-Pyridyl)-L-alanine
  SITE 13: note = alpha-methyl-leucine
  SITE 17: note = Lysine is chemically modified through conjugation of the epsilon-amino group of the Lysine side chain with (gamma-Glu)2-CO-(CH2)16-CO2H
  SITE 20: note = 2-Aminoisobutyric Acid
  SITE 21: note = L-ornithine
  SITE 43: note = Amidated residue
YXQGTXTSDXSIXLDKKAQXXFIEYLTEGGPSSGEPPPSGSEE

SEQ ID NO: 645 - protein, 43 aa, synthetic construct
  SITE 2: note = 2-Aminoisobutyric Acid
  SITE 6: note = alpha-methyl-2-fluoro-L-phenylalanine
  SITE 10: note = 3-(4-Pyridyl)-L-alanine
  SITE 13: note = alpha-methyl-leucine
  SITE 17: note = Lysine is chemically modified through conjugation of the epsilon-amino group of the Lysine side chain with (gamma-Glu)2-CO-(CH2)16-CO2H
  SITE 20: note = 2-Aminoisobutyric Acid
  SITE 21: note = L-ornithine
  SITE 43: note = Amidated residue
YXQGTXTSDXSIXLDKKAQXXFIEYLQEGGPSSGEPPPSGSEE

SEQ ID NO: 646 - protein, 41 aa, synthetic construct
  SITE 2: note = 2-Aminoisobutyric Acid
  SITE 6: note = alpha-methyl-2-fluoro-L-phenylalanine
  SITE 10: note = 3-(4-Pyridyl)-L-alanine
  SITE 13: note = alpha-methyl-leucine
  SITE 16: note = L-ornithine
  SITE 17: note = Lysine is chemically modified through conjugation of the epsilon-amino group of the Lysine side chain with (2-[2-(2-Amino-ethoxy)-ethoxy]-acetyl)-(gamma-Glu)-CO-(CH2) 16-CO2H
  SITE 20: note = 3-(4-Pyridyl)-L-alanine
  SITE 24: note = D-amino acid
  SITE 25: note = alpha-methyl-L-tyrosine
  SITE 41: note = Amidated residue
YXQGTXTSDXSIXLDXKAQXEFIEXLIEGGPSSGAPPPSGS

SEQ ID NO: 647 - protein, 41 aa, synthetic construct
  SITE 2: note = 2-Aminoisobutyric Acid
  SITE 6: note = alpha-methyl-2-fluoro-L-phenylalanine
  SITE 10: note = 3-(4-Pyridyl)-L-alanine
  SITE 13: note = alpha-methyl-leucine
  SITE 16: note = L-ornithine
  SITE 17: note = Lysine is chemically modified through conjugation of the epsilon-amino group of the Lysine side chain with (2-[2-(2-Amino-ethoxy)-ethoxy]-acetyl)-(gamma-Glu)-CO-(CH2) 16-CO2H
  SITE 20: note = 3-(4-Pyridyl)-L-alanine
  SITE 24: note = D-amino acid
  SITE 25: note = alpha-methyl-L-tyrosine
  SITE 41: note = Amidated residue
YXQGTXTSDXSIXLDXKAQXEFIEXLLEGGPSSGAPPPSGS

SEQ ID NO: 648 - protein, 41 aa, synthetic construct
  SITE 2: note = 2-Aminoisobutyric Acid
  SITE 6: note = alpha-methyl-2-fluoro-L-phenylalanine
  SITE 10: note = 3-(4-Pyridyl)-L-alanine
  SITE 13: note = alpha-methyl-leucine
  SITE 16: note = L-ornithine
  SITE 17: note = Lysine is chemically modified through conjugation of the epsilon-amino group of the Lysine side chain with (2-[2-(2-Amino-ethoxy)-ethoxy]-acetyl)-(gamma-Glu)-CO-(CH2) 16-CO2H
  SITE 20: note = 3-(4-Pyridyl)-L-alanine
  SITE 24: note = D-amino acid
  SITE 25: note = alpha-methyl-L-tyrosine
  SITE 41: note = Amidated residue
YXQGTXTSDXSIXLDXKAQXEFIEXLAEGGPSSGAPPPSGS

SEQ ID NO: 649 - protein, 41 aa, synthetic construct
  SITE 2: note = 2-Aminoisobutyric Acid
  SITE 6: note = alpha-methyl-2-fluoro-L-phenylalanine
  SITE 10: note = 3-(4-Pyridyl)-L-alanine
  SITE 13: note = alpha-methyl-leucine
  SITE 16: note = L-ornithine
  SITE 17: note = Lysine is chemically modified through conjugation of the epsilon-amino group of the Lysine side chain with (2-[2-(2-Amino-ethoxy)-ethoxy]-acetyl)-(gamma-Glu)-CO-(CH2) 16-CO2H
  SITE 20: note = 3-(4-Pyridyl)-L-alanine
  SITE 24: note = D-amino acid
  SITE 25: note = alpha-methyl-L-tyrosine
  SITE 41: note = Amidated residue
YXQGTXTSDXSIXLDXKAQXEFIEXLQEGGPSSGAPPPSGS

SEQ ID NO: 650 - protein, 41 aa, synthetic construct
  SITE 2: note = 2-Aminoisobutyric Acid
  SITE 6: note = alpha-methyl-2-fluoro-L-phenylalanine
  SITE 10: note = 3-(4-Pyridyl)-L-alanine
  SITE 13: note = alpha-methyl-leucine
  SITE 16: note = L-ornithine
  SITE 17: note = Lysine is chemically modified through conjugation of the epsilon-amino group of the Lysine side chain with (2-[2-(2-Amino-ethoxy)-ethoxy]-acetyl)-(gamma-Glu)-CO-(CH2) 16-CO2H
  SITE 20: note = 3-(4-Pyridyl)-L-alanine
  SITE 24: note = D-amino acid
  SITE 25: note = alpha-methyl-L-tyrosine
  SITE 41: note = Amidated residue
YXQGTXTSDXSIXLDXKAQXEFIEXLIEGGPSSGEPPPSGS

SEQ ID NO: 651 - protein, 41 aa, synthetic construct
  SITE 2: note = 2-Aminoisobutyric Acid
  SITE 6: note = alpha-methyl-2-fluoro-L-phenylalanine
  SITE 10: note = 3-(4-Pyridyl)-L-alanine
  SITE 13: note = alpha-methyl-leucine
  SITE 16: note = L-ornithine
  SITE 17: note = Lysine is chemically modified through conjugation of the epsilon-amino group of the Lysine side chain with (2-[2-(2-Amino-ethoxy)-ethoxy]-acetyl)-(gamma-Glu)-CO-(CH2) 16-CO2H
  SITE 20: note = 3-(4-Pyridyl)-L-alanine
  SITE 24: note = D-amino acid
  SITE 25: note = alpha-methyl-L-tyrosine
  SITE 41: note = Amidated residue
YXQGTXTSDXSIXLDXKAQXEFIEXLLEGGPSSGEPPPSGS

SEQ ID NO: 652 - protein, 41 aa, synthetic construct; identical to SEQ ID NO: 648
  SITE 2: note = 2-Aminoisobutyric Acid
  SITE 6: note = alpha-methyl-2-fluoro-L-phenylalanine
  SITE 10: note = 3-(4-Pyridyl)-L-alanine
  SITE 13: note = alpha-methyl-leucine
  SITE 16: note = L-ornithine
  SITE 17: note = Lysine is chemically modified through conjugation of the epsilon-amino group of the Lysine side chain with (gamma-Glu)2-CO-(CH2)16-CO2H
  SITE 20: note = 3-(4-Pyridyl)-L-alanine
  SITE 24: note = D-amino acid
  SITE 25: note = alpha-methyl-L-tyrosine
  SITE 41: note = Amidated residue

SEQ ID NO: 653 - protein, 41 aa, synthetic construct; identical to SEQ ID NO: 649
  SITE 2: note = 2-Aminoisobutyric Acid
  SITE 6: note = alpha-methyl-2-fluoro-L-phenylalanine
  SITE 10: note = 3-(4-Pyridyl)-L-alanine
  SITE 13: note = alpha-methyl-leucine
  SITE 16: note = L-ornithine
  SITE 17: note = Lysine is chemically modified through conjugation of the epsilon-amino group of the Lysine side chain with (gamma-Glu)2-CO-(CH2)16-CO2H
  SITE 20: note = 3-(4-Pyridyl)-L-alanine
  SITE 24: note = D-amino acid
  SITE 25: note = alpha-methyl-L-tyrosine
  SITE 41: note = Amidated residue

SEQ ID NO: 654 - protein, 41 aa, synthetic construct
  SITE 2: note = 2-Aminoisobutyric Acid
  SITE 6: note = alpha-methyl-2-fluoro-L-phenylalanine
  SITE 10: note = 3-(4-Pyridyl)-L-alanine
  SITE 13: note = alpha-methyl-leucine
  SITE 16: note = L-ornithine
  SITE 17: note = Lysine is chemically modified through conjugation of the epsilon-amino group of the Lysine side chain with (2-[2-(2-Amino-ethoxy)-ethoxy]-acetyl)-(gamma-Glu)-CO-(CH2) 16-CO2H
  SITE 20: note = 3-(4-Pyridyl)-L-alanine
  SITE 24: note = D-amino acid
  SITE 25: note = alpha-methyl-L-tyrosine
  SITE 41: note = Amidated residue
YXQGTXTSDXSIXLDXKAQXEFIEXLQEGGPSSGEPPPSGS

SEQ ID NO: 655 - protein, 41 aa, synthetic construct; identical to SEQ ID NO: 654
  SITE 2: note = 2-Aminoisobutyric Acid
  SITE 6: note = alpha-methyl-2-fluoro-L-phenylalanine
  SITE 10: note = 3-(4-Pyridyl)-L-alanine
  SITE 13: note = alpha-methyl-leucine
  SITE 16: note = L-ornithine
  SITE 17: note = Lysine is chemically modified through conjugation of the epsilon-amino group of the Lysine side chain with (gamma-Glu)2-CO-(CH2)16-CO2H
  SITE 20: note = 3-(4-Pyridyl)-L-alanine
  SITE 24: note = D-amino acid
  SITE 25: note = alpha-methyl-L-tyrosine
  SITE 41: note = Amidated residue

SEQ ID NO: 656 - protein, 43 aa, synthetic construct
  SITE 2: note = 2-Aminoisobutyric Acid
  SITE 6: note = alpha-methyl-2-fluoro-L-phenylalanine
  SITE 10: note = 3-(4-Pyridyl)-L-alanine
  SITE 13: note = alpha-methyl-leucine
  SITE 17: note = Lysine is chemically modified through conjugation of the epsilon-amino group of the Lysine side chain with (gamma-Glu)2-CO-(CH2)16-CO2H
  SITE 20: note = 2-Aminoisobutyric Acid
  SITE 21: note = L-ornithine
  SITE 43: note = Amidated residue
YXQGTXTSDXSIXLDKKAQXXFIEYLAEGGPSSGEPPPEGSEE

SEQ ID NO: 657 - protein, 43 aa, synthetic construct
  SITE 2: note = 2-Aminoisobutyric Acid
  SITE 6: note = alpha-methyl-2-fluoro-L-phenylalanine
  SITE 10: note = 3-(4-Pyridyl)-L-alanine
  SITE 13: note = alpha-methyl-leucine
  SITE 17: note = Lysine is chemically modified through conjugation of the epsilon-amino group of the Lysine side chain with (gamma-Glu)2-CO-(CH2)16-CO2H
  SITE 20: note = 2-Aminoisobutyric Acid
  SITE 21: note = L-ornithine
  SITE 43: note = Amidated residue
YXQGTXTSDXSIXLDKKAQXXFIEYLSEGGPSSGEPPPEGSEE

SEQ ID NO: 658 - protein, 43 aa, synthetic construct
  SITE 2: note = 2-Aminoisobutyric Acid
  SITE 6: note = alpha-methyl-2-fluoro-L-phenylalanine
  SITE 10: note = 3-(4-Pyridyl)-L-alanine
  SITE 13: note = alpha-methyl-leucine
  SITE 17: note = Lysine is chemically modified through conjugation of the epsilon-amino group of the Lysine side chain with (gamma-Glu)2-CO-(CH2)16-CO2H
  SITE 20: note = 2-Aminoisobutyric Acid
  SITE 21: note = L-ornithine
  SITE 43: note = Amidated residue
YXQGTXTSDXSIXLDKKAQXXFIEYLTEGGPSSGEPPPEGSEE

SEQ ID NO: 659 - protein, 43 aa, synthetic construct
  SITE 2: note = 2-Aminoisobutyric Acid
  SITE 6: note = alpha-methyl-2-fluoro-L-phenylalanine
  SITE 10: note = 3-(4-Pyridyl)-L-alanine
  SITE 13: note = alpha-methyl-leucine
  SITE 17: note = Lysine is chemically modified through conjugation of the epsilon-amino group of the Lysine side chain with (gamma-Glu)2-CO-(CH2)16-CO2H
  SITE 20: note = 2-Aminoisobutyric Acid
  SITE 21: note = L-ornithine
  SITE 43: note = Amidated residue
YXQGTXTSDXSIXLDKKAQXXFIEYLQEGGPSSGEPPPEGSEE

SEQ ID NO: 660 - protein, 43 aa, synthetic construct; identical to SEQ ID NO: 563
  SITE 2: note = 2-Aminoisobutyric Acid
  SITE 6: note = alpha-methyl-2-fluoro-L-phenylalanine
  SITE 10: note = 3-(4-Pyridyl)-L-alanine
  SITE 11: note = alpha-methyl-L-serine
  SITE 13: note = alpha-methyl-leucine
  SITE 16: note = L-ornithine
  SITE 17: note = Lysine is chemically modified through conjugation of the epsilon-amino group of the Lysine side chain with (gamma-Glu)-(6-aminohexanoic acid)-CO-(CH2)16-CO2H
  SITE 20: note = 2-Aminoisobutyric Acid
  SITE 21: note = L-ornithine
  SITE 24: note = D-amino acid
  SITE 25: note = alpha-methyl-L-tyrosine
  SITE 43: note = Amidated residue

SEQ ID NO: 661 - protein, 43 aa, synthetic construct; identical to SEQ ID NO: 563
  SITE 2: note = 2-Aminoisobutyric Acid
  SITE 6: note = alpha-methyl-2-fluoro-L-phenylalanine
  SITE 10: note = 3-(4-Pyridyl)-L-alanine
  SITE 11: note = alpha-methyl-L-serine
  SITE 13: note = alpha-methyl-leucine
  SITE 16: note = L-ornithine
  SITE 17: note = Lysine is chemically modified through conjugation of the epsilon-amino group of the Lysine side chain with (gamma-Glu)-(2-[2-(2-Amino-ethoxy)-ethoxy]-acetyl)-CO-(CH2) 16-CO2H
  SITE 20: note = 2-Aminoisobutyric Acid
  SITE 21: note = L-ornithine
  SITE 24: note = D-amino acid
  SITE 25: note = alpha-methyl-L-tyrosine
  SITE 43: note = Amidated residue

SEQ ID NO: 662 - protein, 43 aa, synthetic construct; identical to SEQ ID NO: 563
  SITE 2: note = 2-Aminoisobutyric Acid
  SITE 6: note = alpha-methyl-2-fluoro-L-phenylalanine
  SITE 10: note = 3-(4-Pyridyl)-L-alanine
  SITE 11: note = alpha-methyl-L-serine
  SITE 13: note = alpha-methyl-leucine
  SITE 16: note = L-ornithine
  SITE 17: note = Lysine is chemically modified through conjugation of the epsilon-amino group of the Lysine side chain with (gamma-Glu)-(epsilon-Lys)-CO-(CH2)16-CO2H
  SITE 20: note = 2-Aminoisobutyric Acid
  SITE 21: note = L-ornithine
  SITE 24: note = D-amino acid
  SITE 25: note = alpha-methyl-L-tyrosine
  SITE 43: note = Amidated residue

SEQ ID NO: 663 - protein, 43 aa, synthetic construct; identical to SEQ ID NO: 563
  SITE 2: note = 2-Aminoisobutyric Acid
  SITE 6: note = alpha-methyl-2-fluoro-L-phenylalanine
  SITE 10: note = 3-(4-Pyridyl)-L-alanine
  SITE 11: note = alpha-methyl-L-serine
  SITE 13: note = alpha-methyl-leucine
  SITE 16: note = L-ornithine
  SITE 17: note = Lysine is chemically modified through conjugation of the epsilon-amino group of the Lysine side chain with (gamma-Glu)-D-Glutamic acid-CO-(CH2)16-CO2H
  SITE 20: note = 2-Aminoisobutyric Acid
  SITE 21: note = L-ornithine
  SITE 24: note = D-amino acid
  SITE 25: note = alpha-methyl-L-tyrosine
  SITE 43: note = Amidated residue

SEQ ID NO: 664 - protein, 43 aa, synthetic construct; identical to SEQ ID NO: 563
  SITE 2: note = 2-Aminoisobutyric Acid
  SITE 6: note = alpha-methyl-2-fluoro-L-phenylalanine
  SITE 10: note = 3-(4-Pyridyl)-L-alanine
  SITE 11: note = alpha-methyl-L-serine
  SITE 13: note = alpha-methyl-leucine
  SITE 16: note = L-ornithine
  SITE 17: note = Lysine is chemically modified through conjugation of the epsilon-amino group of the Lysine side chain with (gamma-Glu)-(Gly)-CO-(CH2)16-CO2H
  SITE 20: note = 2-Aminoisobutyric Acid
  SITE 21: note = L-ornithine
  SITE 24: note = D-amino acid
  SITE 25: note = alpha-methyl-L-tyrosine
  SITE 43: note = Amidated residue

SEQ ID NO: 665 - protein, 42 aa, synthetic construct
  SITE 2: note = 2-Aminoisobutyric Acid
  SITE 6: note = alpha-methyl-2-fluoro-L-phenylalanine
  SITE 10: note = 3-(4-Pyridyl)-L-alanine
  SITE 17: note = Lysine is chemically modified through conjugation of the epsilon-amino group of the Lysine side chain with (gamma-Glu)2-CO-(CH2)16-CO2H
  SITE 20: note = 2-Aminoisobutyric Acid
  SITE 42: note = Amidated residue
YXQGTXTSDXSILLDKKAQXAFIEYLEEGGPSSGAPPPEGTE

SEQ ID NO: 666 - protein, 43 aa, synthetic construct
  SITE 2: note = 2-Aminoisobutyric Acid
  SITE 6: note = alpha-methyl-2-fluoro-L-phenylalanine
  SITE 10: note = 3-(4-Pyridyl)-L-alanine
  SITE 17: note = Lysine is chemically modified through conjugation of the epsilon-amino group of the Lysine side chain with (gamma-Glu)2-CO-(CH2)16-CO2H
  SITE 20: note = 2-Aminoisobutyric Acid
  SITE 43: note = Amidated residue
YXQGTXTSDXSILLDKKAQXAFIEYLEEGGPSSGAPPPEGTGE

SEQ ID NO: 667 - protein, 43 aa, synthetic construct
  SITE 2: note = 2-Aminoisobutyric Acid
  SITE 6: note = alpha-methyl-2-fluoro-L-phenylalanine
  SITE 10: note = 3-(4-Pyridyl)-L-alanine
  SITE 17: note = Lysine is chemically modified through conjugation of the epsilon-amino group of the Lysine side chain with (gamma-Glu)2-CO-(CH2)16-CO2H
  SITE 20: note = 2-Aminoisobutyric Acid
  SITE 27: note = (S)-2-aminohexanedioic acid
  SITE 43: note = Amidated residue
YXQGTXTSDXSILLDKKAQXAFIEYLXEGGPSSGAPPPSGTGE

SEQ ID NO: 668 - protein, 43 aa, synthetic construct; identical to SEQ ID NO: 516
  SITE 2: note = 2-Aminoisobutyric Acid
  SITE 6: note = alpha-methyl-2-fluoro-L-phenylalanine
  SITE 10: note = 3-(4-Pyridyl)-L-alanine
  SITE 17: note = Lysine is chemically modified through conjugation of the epsilon-amino group of the Lysine side chain with (2-[2-(2-Amino-ethoxy)-ethoxy]-acetyl)-(gamma-Glu)-CO-(CH2) 16-CO2H
  SITE 20: note = 2-Aminoisobutyric Acid
  SITE 43: note = Amidated residue

SEQ ID NO: 669 - protein, 43 aa, synthetic construct; identical to SEQ ID NO: 667
  SITE 2: note = 2-Aminoisobutyric Acid
  SITE 6: note = alpha-methyl-2-fluoro-L-phenylalanine
  SITE 10: note = 3-(4-Pyridyl)-L-alanine
  SITE 17: note = Lysine is chemically modified through conjugation of the epsilon-amino group of the Lysine side chain with (2-[2-(2-Amino-ethoxy)-ethoxy]-acetyl)-(gamma-Glu)-CO-(CH2) 16-CO2H
  SITE 20: note = 2-Aminoisobutyric Acid
  SITE 27: note = (S)-2-aminohexanedioic acid
  SITE 43: note = Amidated residue

SEQ ID NO: 670 - protein, 43 aa, synthetic construct
  SITE 2: note = 2-Aminoisobutyric Acid
  SITE 6: note = alpha-methyl-2-fluoro-L-phenylalanine
  SITE 10: note = 3-(4-Pyridyl)-L-alanine
  SITE 17: note = Lysine is chemically modified through conjugation of the epsilon-amino group of the Lysine side chain with (gamma-Glu)2-CO-(CH2)16-CO2H
  SITE 20: note = 2-Aminoisobutyric Acid
  SITE 25: note = alpha-methyl-L-tyrosine
  SITE 43: note = Amidated residue
YXQGTXTSDXSILLDKKAQXAFIEXLEEGGPSSGAPPPSGTGE

SEQ ID NO: 671 - protein, 43 aa, synthetic construct
  SITE 2: note = 2-Aminoisobutyric Acid
  SITE 6: note = alpha-methyl-2-fluoro-L-phenylalanine
  SITE 10: note = 3-(4-Pyridyl)-L-alanine
  SITE 16: note = L-ornithine
  SITE 17: note = Lysine is chemically modified through conjugation of the epsilon-amino group of the Lysine side chain with (gamma-Glu)2-CO-(CH2)16-CO2H
  SITE 20: note = 2-Aminoisobutyric Acid
  SITE 25: note = alpha-methyl-L-tyrosine
  SITE 43: note = Amidated residue
YXQGTXTSDXSILLDXKAQXAFIEXLEEGGPSSGAPPPSGTGE

SEQ ID NO: 672 - protein, 43 aa, synthetic construct
  SITE 2: note = 2-Aminoisobutyric Acid
  SITE 6: note = alpha-methyl-2-fluoro-L-phenylalanine
  SITE 10: note = 3-(4-Pyridyl)-L-alanine
  SITE 17: note = Lysine is chemically modified through conjugation of the epsilon-amino group of the Lysine side chain with (gamma-Glu)2-CO-(CH2)16-CO2H
  SITE 20: note = 2-Aminoisobutyric Acid
  SITE 25: note = alpha-methyl-L-tyrosine
  SITE 43: note = Amidated residue
YXQGTXTSDXSILLDKKAQXAFIEXLEEGGPSSGAPPPSGSGE

SEQ ID NO: 673 - protein, 43 aa, synthetic construct
  SITE 2: note = 2-Aminoisobutyric Acid
  SITE 6: note = alpha-methyl-2-fluoro-L-phenylalanine
  SITE 10: note = 3-(4-Pyridyl)-L-alanine
  SITE 17: note = Lysine is chemically modified through conjugation of the epsilon-amino group of the Lysine side chain with (gamma-Glu)2-CO-(CH2)16-CO2H
  SITE 20: note = 2-Aminoisobutyric Acid
  SITE 25: note = alpha-methyl-L-tyrosine
  SITE 43: note = Amidated residue
YXQGTXTSDXSILLDKKAQXAFIEXLEEGGPSSGAPPPSGEGE

SEQ ID NO: 674 - protein, 43 aa, synthetic construct
  SITE 2: note = 2-Aminoisobutyric Acid
  SITE 6: note = alpha-methyl-2-fluoro-L-phenylalanine
  SITE 10: note = 3-(4-Pyridyl)-L-alanine
  SITE 17: note = Lysine is chemically modified through conjugation of the epsilon-amino group of the Lysine side chain with (gamma-Glu)2-CO-(CH2)16-CO2H
  SITE 20: note = 2-Aminoisobutyric Acid
  SITE 25: note = alpha-methyl-L-tyrosine
  SITE 43: note = Amidated residue
YXQGTXTSDXSILLDKKAQXAFIEXLEEGGPSSGAPPPSGGGE

SEQ ID NO: 675 - protein, 43 aa, synthetic construct; identical to SEQ ID NO: 670
  SITE 2: note = 2-Aminoisobutyric Acid
  SITE 6: note = alpha-methyl-2-fluoro-L-phenylalanine
  SITE 10: note = 3-(4-Pyridyl)-L-alanine
  SITE 17: note = Lysine is chemically modified through conjugation of the epsilon-amino group of the Lysine side chain with (2-[2-(2-Amino-ethoxy)-ethoxy]-acetyl)-(gamma-Glu)-CO-(CH2) 16-CO2H
  SITE 20: note = 2-Aminoisobutyric Acid
  SITE 25: note = alpha-methyl-L-tyrosine
  SITE 43: note = Amidated residue

SEQ ID NO: 676 - protein, 41 aa, synthetic construct
  SITE 2: note = 2-Aminoisobutyric Acid
  SITE 6: note = alpha-methyl-2-fluoro-L-phenylalanine
  SITE 10: note = 3-(4-Pyridyl)-L-alanine
  SITE 16: note = L-ornithine
  SITE 17: note = Lysine is chemically modified through conjugation of the epsilon-amino group of the Lysine side chain with (2-[2-(2-Amino-ethoxy)-ethoxy]-acetyl)-(gamma-Glu)-CO-(CH2) 16-CO2H
  SITE 20: note = 3-(4-Pyridyl)-L-alanine
  SITE 24: note = D-amino acid
  SITE 25: note = alpha-methyl-L-tyrosine
YXQGTXTSDXSILLDXKAQXEFIEXLLEGGPSSGAPPPSGE

SEQ ID NO: 677 - protein, 41 aa, synthetic construct
  SITE 2: note = 2-Aminoisobutyric Acid
  SITE 6: note = alpha-methyl-2-fluoro-L-phenylalanine
  SITE 10: note = 3-(4-Pyridyl)-L-alanine
  SITE 11: note = alpha-methyl-L-serine
  SITE 13: note = alpha-methyl-leucine
  SITE 16: note = L-ornithine
  SITE 17: note = Lysine is chemically modified through conjugation of the epsilon-amino group of the Lysine side chain with (2-[2-(2-Amino-ethoxy)-ethoxy]-acetyl)-(gamma-Glu)-CO-(CH2) 16-CO2H
  SITE 20: note = 2-Aminoisobutyric Acid
  SITE 24: note = D-amino acid
  SITE 25: note = alpha-methyl-L-tyrosine
  SITE 41: note = Amidated residue
YXQGTXTSDXXIXLDXKAAXEFIEXLIEGGPSSGAPPPSGS

SEQ ID NO: 678 - protein, 41 aa, synthetic construct
  SITE 2: note = 2-Aminoisobutyric Acid
  SITE 6: note = alpha-methyl-2-fluoro-L-phenylalanine
  SITE 10: note = 3-(4-Pyridyl)-L-alanine
  SITE 11: note = alpha-methyl-L-serine
  SITE 13: note = alpha-methyl-leucine
  SITE 16: note = L-ornithine
  SITE 17: note = Lysine is chemically modified through conjugation of the epsilon-amino group of the Lysine side chain with (2-[2-(2-Amino-ethoxy)-ethoxy]-acetyl)-(gamma-Glu)-CO-(CH2) 16-CO2H
  SITE 20: note = 2-Aminoisobutyric Acid
  SITE 24: note = D-amino acid
  SITE 25: note = alpha-methyl-L-tyrosine
  SITE 41: note = Amidated residue
YXQGTXTSDXXIXLDXKAAXEFIEXLLEGGPSSGAPPPSGS

SEQ ID NO: 679 - protein, 41 aa, synthetic construct; identical to SEQ ID NO: 677
  SITE 2: note = 2-Aminoisobutyric Acid
  SITE 6: note = alpha-methyl-2-fluoro-L-phenylalanine
  SITE 10: note = 3-(4-Pyridyl)-L-alanine
  SITE 11: note = alpha-methyl-L-serine
  SITE 13: note = alpha-methyl-leucine
  SITE 16: note = L-ornithine
  SITE 17: note = Lysine is chemically modified through conjugation of the epsilon-amino group of the Lysine side chain with (gamma-Glu)2-CO-(CH2)16-CO2H
  SITE 20: note = 2-Aminoisobutyric Acid
  SITE 24: note = D-amino acid
  SITE 25: note = alpha-methyl-L-tyrosine
  SITE 41: note = Amidated residue

SEQ ID NO: 680 - protein, 43 aa, synthetic construct
  SITE 2: note = 2-Aminoisobutyric Acid
  SITE 6: note = alpha-methyl-2-fluoro-L-phenylalanine
  SITE 10: note = 3-(4-Pyridyl)-L-alanine
  SITE 16: note = L-ornithine
  SITE 17: note = Lysine is chemically modified through conjugation of the epsilon-amino group of the Lysine side chain with (gamma-Glu)2-CO-(CH2)16-CO2H
  SITE 20: note = 2-Aminoisobutyric Acid
  SITE 21: note = L-ornithine
  SITE 25: note = alpha-methyl-L-tyrosine
  SITE 43: note = Amidated residue
YXQGTXTSDXSILLDXKAQXXFIEXLEEGGPSSGAPPPSGTGE

SEQ ID NO: 681 - protein, 41 aa, synthetic construct
  SITE 2: note = 2-Aminoisobutyric Acid
  SITE 6: note = alpha-methyl-2-fluoro-L-phenylalanine
  SITE 10: note = 3-(4-Pyridyl)-L-alanine
  SITE 13: note = alpha-methyl-leucine
  SITE 16: note = L-ornithine
  SITE 17: note = Lysine is chemically modified through conjugation of the epsilon-amino group of the Lysine side chain with (2-[2-(2-Amino-ethoxy)-ethoxy]-acetyl)-(gamma-Glu)-CO-(CH2) 16-CO2H
  SITE 20: note = 3-(4-Pyridyl)-L-alanine
  SITE 21: note = L-ornithine
  SITE 24: note = D-amino acid
  SITE 25: note = alpha-methyl-L-tyrosine
  SITE 41: note = Amidated residue
YXQGTXTSDXSIXLDXKAQXXFIEXLIEGGPSSGEPPPEGE

SEQ ID NO: 682 - protein, 41 aa, synthetic construct
  SITE 2: note = 2-Aminoisobutyric Acid
  SITE 6: note = alpha-methyl-2-fluoro-L-phenylalanine
  SITE 10: note = 3-(4-Pyridyl)-L-alanine
  SITE 13: note = alpha-methyl-leucine
  SITE 16: note = L-ornithine
  SITE 17: note = Lysine is chemically modified through conjugation of the epsilon-amino group of the Lysine side chain with (2-[2-(2-Amino-ethoxy)-ethoxy]-acetyl)-(gamma-Glu)-CO-(CH2) 16-CO2H
  SITE 20: note = 3-(4-Pyridyl)-L-alanine
  SITE 21: note = L-ornithine
  SITE 24: note = D-amino acid
  SITE 25: note = alpha-methyl-L-tyrosine
  SITE 41: note = Amidated residue
YXQGTXTSDXSIXLDXKAQXXFIEXLIEGGPSSGEPPPEAE

SEQ ID NO: 683 - protein, 41 aa, synthetic construct
  SITE 2: note = 2-Aminoisobutyric Acid
  SITE 6: note = alpha-methyl-2-fluoro-L-phenylalanine
  SITE 10: note = 3-(4-Pyridyl)-L-alanine
  SITE 13: note = alpha-methyl-leucine
  SITE 16: note = L-ornithine
  SITE 17: note = Lysine is chemically modified through conjugation of the epsilon-amino group of the Lysine side chain with (2-[2-(2-Amino-ethoxy)-ethoxy]-acetyl)-(gamma-Glu)-CO-(CH2) 16-CO2H
  SITE 20: note = 3-(4-Pyridyl)-L-alanine
  SITE 21: note = L-ornithine
  SITE 24: note = D-amino acid
  SITE 25: note = alpha-methyl-L-tyrosine
  SITE 41: note = Amidated residue
YXQGTXTSDXSIXLDXKAQXXFIEXLIEGGPSSGEPPPESE

SEQ ID NO: 684 - protein, 41 aa, synthetic construct
  SITE 2: note = 2-Aminoisobutyric Acid
  SITE 6: note = alpha-methyl-2-fluoro-L-phenylalanine
  SITE 10: note = 3-(4-Pyridyl)-L-alanine
  SITE 13: note = alpha-methyl-leucine
  SITE 16: note = L-ornithine
  SITE 17: note = Lysine is chemically modified through conjugation of the epsilon-amino group of the Lysine side chain with (2-[2-(2-Amino-ethoxy)-ethoxy]-acetyl)-(gamma-Glu)-CO-(CH2) 16-CO2H
  SITE 20: note = 3-(4-Pyridyl)-L-alanine
  SITE 21: note = L-ornithine
  SITE 24: note = D-amino acid
  SITE 25: note = alpha-methyl-L-tyrosine
  SITE 41: note = Amidated residue
YXQGTXTSDXSIXLDXKAQXXFIEXLIEGGPSSGEPPPETE

SEQ ID NO: 685 - protein, 42 aa, synthetic construct
  SITE 2: note = 2-Aminoisobutyric Acid
  SITE 6: note = alpha-methyl-2-fluoro-L-phenylalanine
  SITE 10: note = 3-(4-Pyridyl)-L-alanine
  SITE 13: note = alpha-methyl-leucine
  SITE 16: note = L-ornithine
  SITE 17: note = Lysine is chemically modified through conjugation of the epsilon-amino group of the Lysine side chain with (2-[2-(2-Amino-ethoxy)-ethoxy]-acetyl)-(gamma-Glu)-CO-(CH2) 16-CO2H
  SITE 20: note = 3-(4-Pyridyl)-L-alanine
  SITE 21: note = L-ornithine
  SITE 24: note = D-amino acid
  SITE 25: note = alpha-methyl-L-tyrosine
  SITE 42: note = Amidated residue
YXQGTXTSDXSIXLDXKAQXXFIEXLIEGGPSSGEPPPEGTE

SEQ ID NO: 686 - protein, 43 aa, synthetic construct
  SITE 2: note = 2-Aminoisobutyric Acid
  SITE 6: note = alpha-methyl-2-fluoro-L-phenylalanine
  SITE 10: note = 3-(4-Pyridyl)-L-alanine
  SITE 13: note = alpha-methyl-leucine
  SITE 16: note = L-ornithine
  SITE 17: note = Lysine is chemically modified through conjugation of the epsilon-amino group of the Lysine side chain with (2-[2-(2-Amino-ethoxy)-ethoxy]-acetyl)-(gamma-Glu)-CO-(CH2) 16-CO2H
  SITE 20: note = 3-(4-Pyridyl)-L-alanine
  SITE 21: note = L-ornithine
  SITE 24: note = D-amino acid
  SITE 25: note = alpha-methyl-L-tyrosine
  SITE 43: note = Amidated residue
YXQGTXTSDXSIXLDXKAQXXFIEXLIEGGPSSGEPPPEGTGE

SEQ ID NO: 687 - protein, 41 aa, synthetic construct; identical to SEQ ID NO: 481
  SITE 2: note = 2-Aminoisobutyric Acid
  SITE 6: note = alpha-methyl-2-fluoro-L-phenylalanine
  SITE 10: note = 3-(4-Pyridyl)-L-alanine
  SITE 13: note = alpha-methyl-leucine
  SITE 16: note = L-ornithine
  SITE 17: note = Lysine is chemically modified through conjugation of the epsilon-amino group of the Lysine side chain with (gamma-Glu)2-CO-(CH2)16-CO2H
  SITE 20: note = 3-(4-Pyridyl)-L-alanine
  SITE 21: note = L-ornithine
  SITE 24: note = D-amino acid
  SITE 25: note = alpha-methyl-L-tyrosine
  SITE 41: note = Amidated residue

SEQ ID NO: 688 - protein, 41 aa, synthetic construct
  SITE 2: note = 2-Aminoisobutyric Acid
  SITE 6: note = alpha-methyl-2-fluoro-L-phenylalanine
  SITE 10: note = 3-(4-Pyridyl)-L-alanine
  SITE 13: note = alpha-methyl-leucine
  SITE 16: note = L-ornithine
  SITE 17: note = Lysine is chemically modified through conjugation of the epsilon-amino group of the Lysine side chain with (gamma-Glu)2-CO-(CH2)16-CO2H
  SITE 20: note = 3-(4-Pyridyl)-L-alanine
  SITE 21: note = L-ornithine
  SITE 24: note = D-amino acid
  SITE 25: note = alpha-methyl-L-tyrosine
  SITE 41: note = Amidated residue
YXQGTXTSDXSIXLDXKAQXXFIEXLIEGGPSSGEPPPSGE

SEQ ID NO: 689 - protein, 41 aa, synthetic construct; identical to SEQ ID NO: 681
  SITE 2: note = 2-Aminoisobutyric Acid
  SITE 6: note = alpha-methyl-2-fluoro-L-phenylalanine
  SITE 10: note = 3-(4-Pyridyl)-L-alanine
  SITE 13: note = alpha-methyl-leucine
  SITE 16: note = L-ornithine
  SITE 17: note = Lysine is chemically modified through conjugation of the epsilon-amino group of the Lysine side chain with (gamma-Glu)2-CO-(CH2)16-CO2H
  SITE 20: note = 3-(4-Pyridyl)-L-alanine
  SITE 21: note = L-ornithine
  SITE 24: note = D-amino acid
  SITE 25: note = alpha-methyl-L-tyrosine
  SITE 41: note = Amidated residue

SEQ ID NO: 690 - protein, 41 aa, synthetic construct; identical to SEQ ID NO: 682
  SITE 2: note = 2-Aminoisobutyric Acid
  SITE 6: note = alpha-methyl-2-fluoro-L-phenylalanine
  SITE 10: note = 3-(4-Pyridyl)-L-alanine
  SITE 13: note = alpha-methyl-leucine
  SITE 16: note = L-ornithine
  SITE 17: note = Lysine is chemically modified through conjugation of the epsilon-amino group of the Lysine side chain with (gamma-Glu)2-CO-(CH2)16-CO2H
  SITE 20: note = 3-(4-Pyridyl)-L-alanine
  SITE 21: note = L-ornithine
  SITE 24: note = D-amino acid
  SITE 25: note = alpha-methyl-L-tyrosine
  SITE 41: note = Amidated residue

SEQ ID NO: 691 - protein, 41 aa, synthetic construct; identical to SEQ ID NO: 683
  SITE 2: note = 2-Aminoisobutyric Acid
  SITE 6: note = alpha-methyl-2-fluoro-L-phenylalanine
  SITE 10: note = 3-(4-Pyridyl)-L-alanine
  SITE 13: note = alpha-methyl-leucine
  SITE 16: note = L-ornithine
  SITE 17: note = Lysine is chemically modified through conjugation of the epsilon-amino group of the Lysine side chain with (gamma-Glu)2-CO-(CH2)16-CO2H
  SITE 20: note = 3-(4-Pyridyl)-L-alanine
  SITE 21: note = L-ornithine
  SITE 24: note = D-amino acid
  SITE 25: note = alpha-methyl-L-tyrosine
  SITE 41: note = Amidated residue

SEQ ID NO: 692 - protein, 41 aa, synthetic construct; identical to SEQ ID NO: 684
  SITE 2: note = 2-Aminoisobutyric Acid
  SITE 6: note = alpha-methyl-2-fluoro-L-phenylalanine
  SITE 10: note = 3-(4-Pyridyl)-L-alanine
  SITE 13: note = alpha-methyl-leucine
  SITE 16: note = L-ornithine
  SITE 17: note = Lysine is chemically modified through conjugation of the epsilon-amino group of the Lysine side chain with (gamma-Glu)2-CO-(CH2)16-CO2H
  SITE 20: note = 3-(4-Pyridyl)-L-alanine
  SITE 21: note = L-ornithine
  SITE 24: note = D-amino acid
  SITE 25: note = alpha-methyl-L-tyrosine
  SITE 41: note = Amidated residue

SEQ ID NO: 693 - protein, 42 aa, synthetic construct; identical to SEQ ID NO: 685
  SITE 2: note = 2-Aminoisobutyric Acid
  SITE 6: note = alpha-methyl-2-fluoro-L-phenylalanine
  SITE 10: note = 3-(4-Pyridyl)-L-alanine
  SITE 13: note = alpha-methyl-leucine
  SITE 16: note = L-ornithine
  SITE 17: note = Lysine is chemically modified through conjugation of the epsilon-amino group of the Lysine side chain with (gamma-Glu)2-CO-(CH2)16-CO2H
  SITE 20: note = 3-(4-Pyridyl)-L-alanine
  SITE 21: note = L-ornithine
  SITE 24: note = D-amino acid
  SITE 25: note = alpha-methyl-L-tyrosine

SEQ ID NO: 694 - protein, 43 aa, synthetic construct; identical to SEQ ID NO: 686
  SITE 2: note = 2-Aminoisobutyric Acid
  SITE 6: note = alpha-methyl-2-fluoro-L-phenylalanine
  SITE 10: note = 3-(4-Pyridyl)-L-alanine
  SITE 13: note = alpha-methyl-leucine
  SITE 16: note = L-ornithine
  SITE 17: note = Lysine is chemically modified through conjugation of the epsilon-amino group of the Lysine side chain with (gamma-Glu)2-CO-(CH2)16-CO2H
  SITE 20: note = 3-(4-Pyridyl)-L-alanine
  SITE 21: note = L-ornithine
  SITE 24: note = D-amino acid
  SITE 25: note = alpha-methyl-L-tyrosine
  SITE 43: note = Amidated residue

SEQ ID NO: 695 - protein, 43 aa, synthetic construct
  SITE 2: note = 2-Aminoisobutyric Acid
  SITE 6: note = alpha-methyl-2-fluoro-L-phenylalanine
  SITE 10: note = 3-(4-Pyridyl)-L-alanine
  SITE 11: note = alpha-methyl-L-serine
  SITE 13: note = alpha-methyl-leucine
  SITE 16: note = L-ornithine
  SITE 17: note = Lysine is chemically modified through conjugation of the epsilon-amino group of the Lysine side chain with (2-[2-(2-Amino-ethoxy)-ethoxy]-acetyl)-(gamma-Glu)-CO-(CH2) 16-CO2H
  SITE 20: note = 2-Aminoisobutyric Acid
  SITE 24: note = D-amino acid
  SITE 25: note = alpha-methyl-L-tyrosine
  SITE 43: note = Amidated residue
YXQGTXTSDXXIXLDXKAAXEFIEXLIEGGPSSGAPPPSGTGE

SEQ ID NO: 696 - protein, 43 aa, synthetic construct; identical to SEQ ID NO: 695
  SITE 2: note = 2-Aminoisobutyric Acid
  SITE 6: note = alpha-methyl-2-fluoro-L-phenylalanine
  SITE 10: note = 3-(4-Pyridyl)-L-alanine
  SITE 11: note = alpha-methyl-L-serine
  SITE 13: note = alpha-methyl-leucine
  SITE 16: note = L-ornithine
  SITE 17: note = Lysine is chemically modified through conjugation of the epsilon-amino group of the Lysine side chain with (gamma-Glu)2-CO-(CH2)16-CO2H
  SITE 20: note = 2-Aminoisobutyric Acid
  SITE 24: note = D-amino acid
  SITE 25: note = alpha-methyl-L-tyrosine
  SITE 43: note = Amidated residue

SEQ ID NO: 697 - protein, 42 aa, synthetic construct; identical to SEQ ID NO: 685
  SITE 2: note = 2-Aminoisobutyric Acid
  SITE 6: note = alpha-methyl-2-fluoro-L-phenylalanine
  SITE 10: note = 3-(4-Pyridyl)-L-alanine
  SITE 13: note = alpha-methyl-leucine
  SITE 16: note = L-ornithine
  SITE 17: note = Lysine is chemically modified through conjugation of the epsilon-amino group of the Lysine side chain with (2-[2-(2-Amino-ethoxy)-ethoxy]-acetyl)-(gamma-Glu)-CO-(CH2) 16-CO2H
  SITE 20: note = 3-(4-Pyridyl)-L-alanine
  SITE 21: note = L-ornithine
  SITE 24: note = D-amino acid
  SITE 25: note = alpha-methyl-L-tyrosine
  SITE 42: note = Amidated D-amino acid

SEQ ID NO: 698 - protein, 43 aa, synthetic construct
  SITE 2: note = 2-Aminoisobutyric Acid
  SITE 6: note = alpha-methyl-2-fluoro-L-phenylalanine
  SITE 10: note = 3-(4-Pyridyl)-L-alanine
  SITE 13: note = alpha-methyl-leucine
  SITE 16: note = L-ornithine
  SITE 17: note = Lysine is chemically modified through conjugation of the epsilon-amino group of the Lysine side chain with (2-[2-(2-Amino-ethoxy)-ethoxy]-acetyl)-(gamma-Glu)-CO-(CH2) 16-CO2H
  SITE 20: note = 3-(4-Pyridyl)-L-alanine
  SITE 21: note = L-ornithine
  SITE 24: note = D-amino acid
  SITE 25: note = alpha-methyl-L-tyrosine
  SITE 43: note = Amidated D-amino acid
YXQGTXTSDXSIXLDXKAQXXFIEXLIEGGPSSGEPPPEGEGE

SEQ ID NO: 699 - protein, 41 aa, synthetic construct
  SITE 2: note = 2-Aminoisobutyric Acid
  SITE 6: note = alpha-methyl-2-fluoro-L-phenylalanine
  SITE 10: note = 3-(4-Pyridyl)-L-alanine
  SITE 11: note = alpha-methyl-L-serine
  SITE 13: note = alpha-methyl-leucine
  SITE 16: note = L-ornithine
  SITE 17: note = Lysine is chemically modified through conjugation of the epsilon-amino group of the Lysine side chain with (2-[2-(2-Amino-ethoxy)-ethoxy]-acetyl)-(gamma-Glu)-CO-(CH2) 16-CO2H
  SITE 20: note = 2-Aminoisobutyric Acid
  SITE 24: note = D-amino acid
  SITE 25: note = alpha-methyl-L-tyrosine
  SITE 41: note = Amidated residue
YXQGTXTSDXXIXLDXKAAXEFIEXLVEGGPSSGAPPPSGS

SEQ ID NO: 700 - protein, 41 aa, synthetic construct
  SITE 2: note = 2-Aminoisobutyric Acid
  SITE 6: note = alpha-methyl-2-fluoro-L-phenylalanine
  SITE 10: note = 3-(4-Pyridyl)-L-alanine
  SITE 11: note = alpha-methyl-L-serine
  SITE 13: note = alpha-methyl-leucine
  SITE 16: note = L-ornithine
  SITE 17: note = Lysine is chemically modified through conjugation of the epsilon-amino group of the Lysine side chain with (2-[2-(2-Amino-ethoxy)-ethoxy]-acetyl)-(gamma-Glu)-CO-(CH2) 16-CO2H
  SITE 20: note = 3-(4-Pyridyl)-L-alanine
  SITE 24: note = D-amino acid
  SITE 25: note = alpha-methyl-L-tyrosine
  SITE 41: note = Amidated residue
YXQGTXTSDXXIXLDXKAQXEFIEXLVEGGPSSGAPPPSGS

SEQ ID NO: 701 - protein, 41 aa, synthetic construct
  SITE 2: note = 2-Aminoisobutyric Acid
  SITE 6: note = alpha-methyl-2-fluoro-L-phenylalanine
  SITE 10: note = 3-(4-Pyridyl)-L-alanine
  SITE 11: note = alpha-methyl-L-serine
  SITE 13: note = alpha-methyl-leucine
  SITE 16: note = L-ornithine
  SITE 17: note = Lysine is chemically modified through conjugation of the epsilon-amino group of the Lysine side chain with (gamma-Glu)2-CO-(CH2)16-CO2H
  SITE 20: note = 2-Aminoisobutyric Acid
  SITE 24: note = D-amino acid
  SITE 25: note = alpha-methyl-L-tyrosine
  SITE 41: note = Amidated residue
YXQGTXTSDXXIXLDXKAAXEFIEXLVEGGPSSGEPPPSGS

SEQ ID NO: 702 - protein, 41 aa, synthetic construct; identical to SEQ ID NO: 700
  SITE 2: note = 2-Aminoisobutyric Acid
  SITE 6: note = alpha-methyl-2-fluoro-L-phenylalanine
  SITE 10: note = 3-(4-Pyridyl)-L-alanine
  SITE 11: note = alpha-methyl-L-serine
  SITE 13: note = alpha-methyl-leucine
  SITE 16: note = L-ornithine
  SITE 17: note = Lysine is chemically modified through conjugation of the epsilon-amino group of the Lysine side chain with (gamma-Glu)2-CO-(CH2)16-CO2H
  SITE 20: note = 3-(4-Pyridyl)-L-alanine
  SITE 24: note = D-amino acid
  SITE 25: note = alpha-methyl-L-tyrosine
  SITE 41: note = Amidated residue

SEQ ID NO: 703 - protein, 43 aa, synthetic construct
  SITE 2: note = 2-Aminoisobutyric Acid
  SITE 6: note = alpha-methyl-2-fluoro-L-phenylalanine
  SITE 10: note = 3-(4-Pyridyl)-L-alanine
  SITE 11: note = alpha-methyl-L-serine
  SITE 13: note = alpha-methyl-leucine
  SITE 16: note = L-ornithine
  SITE 17: note = Lysine is chemically modified through conjugation of the epsilon-amino group of the Lysine side chain with (2-[2-(2-Amino-ethoxy)-ethoxy]-acetyl)-(gamma-Glu)-CO-(CH2) 16-CO2H
  SITE 20: note = 2-Aminoisobutyric Acid
  SITE 21: note = L-ornithine
  SITE 24: note = D-amino acid
  SITE 25: note = alpha-methyl-L-tyrosine
  SITE 43: note = Amidated residue
YXQGTXTSDXXIXLDXKAQXXFIEXLIEGGPSSGEPPPEGTGE

SEQ ID NO: 704 - protein, 41 aa, synthetic construct
  SITE 2: note = 2-Aminoisobutyric Acid
  SITE 6: note = alpha-methyl-2-fluoro-L-phenylalanine
  SITE 10: note = 3-(4-Pyridyl)-L-alanine
  SITE 11: note = alpha-methyl-L-serine
  SITE 13: note = alpha-methyl-leucine
  SITE 16: note = L-ornithine
  SITE 17: note = Lysine is chemically modified through conjugation of the epsilon-amino group of the Lysine side chain with (2-[2-(2-Amino-ethoxy)-ethoxy]-acetyl)-(gamma-Glu)-CO-(CH2) 16-CO2H
  SITE 20: note = 2-Aminoisobutyric Acid
  SITE 21: note = L-ornithine
  SITE 24: note = D-amino acid
  SITE 25: note = alpha-methyl-L-tyrosine
  SITE 41: note = Amidated residue
YXQGTXTSDXXIXLDXKAQXXFIEXLIEGGPSSGEPPPEGE

SEQ ID NO: 705 - protein, 41 aa, synthetic construct
  SITE 2: note = 2-Aminoisobutyric Acid
  SITE 6: note = alpha-methyl-2-fluoro-L-phenylalanine
  SITE 10: note = 3-(4-Pyridyl)-L-alanine
  SITE 11: note = alpha-methyl-L-serine
  SITE 13: note = alpha-methyl-leucine
  SITE 16: note = L-ornithine
  SITE 17: note = Lysine is chemically modified through conjugation of the epsilon-amino group of the Lysine side chain with (2-[2-(2-Amino-ethoxy)-ethoxy]-acetyl)-(gamma-Glu)-CO-(CH2) 16-CO2H
  SITE 20: note = 3-(4-Pyridyl)-L-alanine
  SITE 24: note = D-amino acid
  SITE 25: note = alpha-methyl-L-tyrosine
  SITE 41: note = Amidated residue
YXQGTXTSDXXIXLDXKAQXEFIEXLIEGGPSSGAPPPSGS

SEQ ID NO: 706 - protein, 41 aa, synthetic construct; identical to SEQ ID NO: 705
  SITE 2: note = 2-Aminoisobutyric Acid
  SITE 6: note = alpha-methyl-2-fluoro-L-phenylalanine
  SITE 10: note = 3-(4-Pyridyl)-L-alanine
  SITE 11: note = alpha-methyl-L-serine
  SITE 13: note = alpha-methyl-leucine
  SITE 16: note = L-ornithine
  SITE 17: note = Lysine is chemically modified through conjugation of the epsilon-amino group of the Lysine side chain with (gamma-Glu)2-CO-(CH2)16-CO2H
  SITE 20: note = 3-(4-Pyridyl)-L-alanine
  SITE 24: note = D-amino acid
  SITE 25: note = alpha-methyl-L-tyrosine
  SITE 41: note = Amidated residue

SEQ ID NO: 707 - protein, 41 aa, synthetic construct
  SITE 2: note = 2-Aminoisobutyric Acid
  SITE 6: note = alpha-methyl-2-fluoro-L-phenylalanine
  SITE 10: note = 3-(4-Pyridyl)-L-alanine
  SITE 11: note = alpha-methyl-L-serine
  SITE 13: note = alpha-methyl-leucine
  SITE 16: note = L-ornithine
  SITE 17: note = Lysine is chemically modified through conjugation of the epsilon-amino group of the Lysine side chain with (2-[2-(2-Amino-ethoxy)-ethoxy]-acetyl)-(gamma-Glu)-CO-(CH2) 16-CO2H
  SITE 20: note = 2-Aminoisobutyric Acid
  SITE 24: note = D-amino acid
  SITE 25: note = alpha-methyl-L-tyrosine
  SITE 41: note = Amidated residue
YXQGTXTSDXXIXLDXKAAXEFIEXLIEGGPSSGAPPPSGE

SEQ ID NO: 708 - protein, 42 aa, synthetic construct
  SITE 2: note = 2-Aminoisobutyric Acid
  SITE 6: note = alpha-methyl-2-fluoro-L-phenylalanine
  SITE 10: note = 3-(4-Pyridyl)-L-alanine
  SITE 11: note = alpha-methyl-L-serine
  SITE 13: note = alpha-methyl-leucine
  SITE 16: note = L-ornithine
  SITE 17: note = Lysine is chemically modified through conjugation of the epsilon-amino group of the Lysine side chain with (2-[2-(2-Amino-ethoxy)-ethoxy]-acetyl)-(gamma-Glu)-CO-(CH2) 16-CO2H
  SITE 20: note = 2-Aminoisobutyric Acid
  SITE 24: note = D-amino acid
  SITE 25: note = alpha-methyl-L-tyrosine
  SITE 42: note = Amidated residue
YXQGTXTSDXXIXLDXKAAXEFIEXLIEGGPSSGAPPPSGSE

SEQ ID NO: 709 - protein, 42 aa, synthetic construct
  SITE 2: note = 2-Aminoisobutyric Acid
  SITE 6: note = alpha-methyl-2-fluoro-L-phenylalanine
  SITE 10: note = 3-(4-Pyridyl)-L-alanine
  SITE 11: note = alpha-methyl-L-serine
  SITE 13: note = alpha-methyl-leucine
  SITE 16: note = L-ornithine
  SITE 17: note = Lysine is chemically modified through conjugation of the epsilon-amino group of the Lysine side chain with (2-[2-(2-Amino-ethoxy)-ethoxy]-acetyl)-(gamma-Glu)-CO-(CH2) 16-CO2H
  SITE 20: note = 2-Aminoisobutyric Acid
  SITE 24: note = D-amino acid
  SITE 25: note = alpha-methyl-L-tyrosine
  SITE 42: note = Amidated residue
YXQGTXTSDXXIXLDXKAAXEFIEXLIEGGPSSGAPPPSGEE

SEQ ID NO: 710 - protein, 43 aa, synthetic construct
  SITE 2: note = 2-Aminoisobutyric Acid
  SITE 6: note = alpha-methyl-2-fluoro-L-phenylalanine
  SITE 10: note = 3-(4-Pyridyl)-L-alanine
  SITE 11: note = alpha-methyl-L-serine
  SITE 13: note = alpha-methyl-leucine
  SITE 16: note = L-ornithine
  SITE 17: note = Lysine is chemically modified through conjugation of the epsilon-amino group of the Lysine side chain with (2-[2-(2-Amino-ethoxy)-ethoxy]-acetyl)-(gamma-Glu)-CO-(CH2) 16-CO2H
  SITE 20: note = 2-Aminoisobutyric Acid
  SITE 24: note = D-amino acid
  SITE 25: note = alpha-methyl-L-tyrosine
  SITE 43: note = Amidated residue
YXQGTXTSDXXIXLDXKAAXEFIEXLIEGGPSSGAPPPSGSEE

SEQ ID NO: 711 - protein, 43 aa, synthetic construct
  SITE 2: note = 2-Aminoisobutyric Acid
  SITE 6: note = alpha-methyl-2-fluoro-L-phenylalanine
  SITE 10: note = 3-(4-Pyridyl)-L-alanine
  SITE 11: note = alpha-methyl-L-serine
  SITE 13: note = alpha-methyl-leucine
  SITE 16: note = L-ornithine
  SITE 17: note = Lysine is chemically modified through conjugation of the epsilon-amino group of the Lysine side chain with (2-[2-(2-Amino-ethoxy)-ethoxy]-acetyl)-(gamma-Glu)-CO-(CH2) 16-CO2H
  SITE 20: note = 2-Aminoisobutyric Acid
  SITE 24: note = D-amino acid
  SITE 25: note = alpha-methyl-L-tyrosine
  SITE 43: note = Amidated residue
YXQGTXTSDXXIXLDXKAAXEFIEXLIEGGPSSGAPPPSGEEE

SEQ ID NO: 712 - protein, 41 aa, synthetic construct
  SITE 2: note = 2-Aminoisobutyric Acid
  SITE 6: note = alpha-methyl-2-fluoro-L-phenylalanine
  SITE 10: note = 3-(4-Pyridyl)-L-alanine
  SITE 13: note = alpha-methyl-leucine
  SITE 16: note = L-ornithine
  SITE 17: note = Lysine is chemically modified through conjugation of the epsilon-amino group of the Lysine side chain with (2-[2-(2-Amino-ethoxy)-ethoxy]-acetyl)-(gamma-Glu)-CO-(CH2) 16-CO2H
  SITE 20: note = 3-(4-Pyridyl)-L-alanine
  SITE 21: note = L-ornithine
  SITE 24: note = D-amino acid
  SITE 25: note = alpha-methyl-L-tyrosine
  SITE 41: note = Amidated residue
YXQGTXTSDXSIXLDXKAQXXFIEXLIEGGPSSGEPPPSGS

SEQ ID NO: 713 - protein, 41 aa, synthetic construct
  SITE 2: note = 2-Aminoisobutyric Acid
  SITE 6: note = alpha-methyl-2-fluoro-L-phenylalanine
  SITE 10: note = 3-(4-Pyridyl)-L-alanine
  SITE 11: note = alpha-methyl-L-serine
  SITE 13: note = alpha-methyl-leucine
  SITE 16: note = L-ornithine
  SITE 17: note = Lysine is chemically modified through conjugation of the epsilon-amino group of the Lysine side chain with (2-[2-(2-Amino-ethoxy)-ethoxy]-acetyl)-(gamma-Glu)-CO-(CH2) 16-CO2H
  SITE 20: note = 2-Aminoisobutyric Acid
  SITE 24: note = D-amino acid
  SITE 25: note = alpha-methyl-L-tyrosine
  SITE 41: note = Amidated residue
YXQGTXTSDXXIXLDXKAAXEFIEXLIEGGPSSGEPPPSGS

SEQ ID NO: 714 - protein, 41 aa, synthetic construct; identical to SEQ ID NO: 677
  SITE 2: note = 2-Aminoisobutyric Acid
  SITE 6: note = alpha-methyl-2-fluoro-L-phenylalanine
  SITE 10: note = 3-(4-Pyridyl)-L-alanine
  SITE 11: note = alpha-methyl-L-serine
  SITE 13: note = alpha-methyl-leucine
  SITE 16: note = L-ornithine
  SITE 17: note = Lysine is chemically modified through conjugation of the epsilon-amino group of the Lysine side chain with (gamma-Glu)2-CO-(CH2)16-CO2H
  SITE 20: note = 2-Aminoisobutyric Acid
  SITE 24: note = D-amino acid
  SITE 25: note = alpha-methyl-L-tyrosine
  SITE 41: note = Amidated residue

SEQ ID NO: 715 - protein, 43 aa, synthetic construct; identical to SEQ ID NO: 695
  SITE 2: note = 2-Aminoisobutyric Acid
  SITE 6: note = alpha-methyl-2-fluoro-L-phenylalanine
  SITE 10: note = 3-(4-Pyridyl)-L-alanine
  SITE 11: note = alpha-methyl-L-serine
  SITE 13: note = alpha-methyl-leucine
  SITE 16: note = L-ornithine
  SITE 17: note = Lysine is chemically modified through conjugation of the epsilon-amino group of the Lysine side chain with (gamma-Glu)2-CO-(CH2)16-CO2H
  SITE 20: note = 2-Aminoisobutyric Acid
  SITE 24: note = D-amino acid
  SITE 25: note = alpha-methyl-L-tyrosine
  SITE 43: note = Amidated residue

SEQ ID NO: 716 - protein, 41 aa, synthetic construct
  SITE 2: note = 2-Aminoisobutyric Acid
  SITE 6: note = alpha-methyl-2-fluoro-L-phenylalanine
  SITE 10: note = 3-(4-Pyridyl)-L-alanine
  SITE 11: note = alpha-methyl-L-serine
  SITE 13: note = alpha-methyl-leucine
  SITE 16: note = L-ornithine
  SITE 17: note = Lysine is chemically modified through conjugation of the epsilon-amino group of the Lysine side chain with (2-[2-(2-Amino-ethoxy)-ethoxy]-acetyl)-(gamma-Glu)-CO-(CH2) 16-CO2H
  SITE 20: note = 3-(4-Pyridyl)-L-alanine
  SITE 24: note = D-amino acid
  SITE 25: note = alpha-methyl-L-tyrosine
  SITE 41: note = Amidated residue
YXQGTXTSDXXIXLDXKAQXEFIEXLIEGGPSSGEPPPSGS

SEQ ID NO: 717 - protein, 43 aa, synthetic construct
  SITE 2: note = 2-Aminoisobutyric Acid
  SITE 6: note = alpha-methyl-2-fluoro-L-phenylalanine
  SITE 10: note = 3-(4-Pyridyl)-L-alanine
  SITE 11: note = alpha-methyl-L-serine
  SITE 13: note = alpha-methyl-leucine
  SITE 16: note = L-ornithine
  SITE 17: note = Lysine is chemically modified through conjugation of the epsilon-amino group of the Lysine side chain with (2-[2-(2-Amino-ethoxy)-ethoxy]-acetyl)-(gamma-Glu)-CO-(CH2) 16-CO2H
  SITE 20: note = 3-(4-Pyridyl)-L-alanine
  SITE 24: note = D-amino acid
  SITE 25: note = alpha-methyl-L-tyrosine
  SITE 43: note = Amidated residue
YXQGTXTSDXXIXLDXKAQXEFIEXLIEGGPSSGEPPPSGTGE

SEQ ID NO: 718 - protein, 42 aa, synthetic construct
  SITE 2: note = 2-Aminoisobutyric Acid
  SITE 6: note = alpha-methyl-2-fluoro-L-phenylalanine
  SITE 10: note = 3-(4-Pyridyl)-L-alanine
  SITE 11: note = alpha-methyl-L-serine
  SITE 13: note = alpha-methyl-leucine
  SITE 16: note = L-ornithine
  SITE 17: note = Lysine is chemically modified through conjugation of the epsilon-amino group of the Lysine side chain with (2-[2-(2-Amino-ethoxy)-ethoxy]-acetyl)-(gamma-Glu)-CO-(CH2) 16-CO2H
  SITE 20: note = 3-(4-Pyridyl)-L-alanine
  SITE 24: note = D-amino acid
  SITE 25: note = alpha-methyl-L-tyrosine
  SITE 42: note = Amidated residue
YXQGTXTSDXXIXLDXKAQXEFIEXLIEGGPSSGAPPPSGSE

SEQ ID NO: 719 - protein, 43 aa, synthetic construct
  SITE 2: note = 2-Aminoisobutyric Acid
  SITE 6: note = alpha-methyl-2-fluoro-L-phenylalanine
  SITE 10: note = 3-(4-Pyridyl)-L-alanine
  SITE 11: note = alpha-methyl-L-serine
  SITE 13: note = alpha-methyl-leucine
  SITE 16: note = L-ornithine
  SITE 17: note = Lysine is chemically modified through conjugation of the epsilon-amino group of the Lysine side chain with (2-[2-(2-Amino-ethoxy)-ethoxy]-acetyl)-(gamma-Glu)-CO-(CH2) 16-CO2H
  SITE 20: note = 3-(4-Pyridyl)-L-alanine
  SITE 24: note = D-amino acid
  SITE 25: note = alpha-methyl-L-tyrosine
  SITE 43: note = Amidated residue
YXQGTXTSDXXIXLDXKAQXEFIEXLIEGGPSSGAPPPSGSEE

SEQ ID NO: 720 - protein, 43 aa, synthetic construct
  SITE 2: note = 2-Aminoisobutyric Acid
  SITE 6: note = alpha-methyl-2-fluoro-L-phenylalanine
  SITE 10: note = 3-(4-Pyridyl)-L-alanine
  SITE 11: note = alpha-methyl-L-serine
  SITE 13: note = alpha-methyl-leucine
  SITE 16: note = L-ornithine
  SITE 17: note = Lysine is chemically modified through conjugation of the epsilon-amino group of the Lysine side chain with (2-[2-(2-Amino-ethoxy)-ethoxy]-acetyl)-(gamma-Glu)-CO-(CH2) 16-CO2H
  SITE 20: note = 3-(4-Pyridyl)-L-alanine
  SITE 24: note = D-amino acid
  SITE 25: note = alpha-methyl-L-tyrosine
  SITE 43: note = Amidated residue
YXQGTXTSDXXIXLDXKAQXEFIEXLIEGGPSSGAPPPSGTGE

SEQ ID NO: 721 - protein, 41 aa, synthetic construct; identical to SEQ ID NO: 716
  SITE 2: note = 2-Aminoisobutyric Acid
  SITE 6: note = alpha-methyl-2-fluoro-L-phenylalanine
  SITE 10: note = 3-(4-Pyridyl)-L-alanine
  SITE 11: note = alpha-methyl-L-serine
  SITE 13: note = alpha-methyl-leucine
  SITE 16: note = L-ornithine
  SITE 17: note = Lysine is chemically modified through conjugation of the epsilon-amino group of the Lysine side chain with (gamma-Glu)2-CO-(CH2)16-CO2H
  SITE 20: note = 3-(4-Pyridyl)-L-alanine
  SITE 24: note = D-amino acid
  SITE 25: note = alpha-methyl-L-tyrosine
  SITE 41: note = Amidated residue

SEQ ID NO: 722 - protein, 42 aa, synthetic construct
  SITE 2: note = 2-Aminoisobutyric Acid
  SITE 6: note = alpha-methyl-2-fluoro-L-phenylalanine
  SITE 10: note = 3-(4-Pyridyl)-L-alanine
  SITE 11: note = alpha-methyl-L-serine
  SITE 13: note = alpha-methyl-leucine
  SITE 16: note = L-ornithine
  SITE 17: note = Lysine is chemically modified through conjugation of the epsilon-amino group of the Lysine side chain with (gamma-Glu)2-CO-(CH2)16-CO2H
  SITE 20: note = 3-(4-Pyridyl)-L-alanine
  SITE 24: note = D-amino acid
  SITE 25: note = alpha-methyl-L-tyrosine
  SITE 42: note = Amidated residue
YXQGTXTSDXXIXLDXKAQXEFIEXLIEGGPSSGEPPPSGSE

SEQ ID NO: 723 - protein, 42 aa, synthetic construct; identical to SEQ ID NO: 718
  SITE 2: note = 2-Aminoisobutyric Acid
  SITE 6: note = alpha-methyl-2-fluoro-L-phenylalanine
  SITE 10: note = 3-(4-Pyridyl)-L-alanine
  SITE 11: note = alpha-methyl-L-serine
  SITE 13: note = alpha-methyl-leucine
  SITE 16: note = L-ornithine
  SITE 17: note = Lysine is chemically modified through conjugation of the epsilon-amino group of the Lysine side chain with (gamma-Glu)2-CO-(CH2)16-CO2H
  SITE 20: note = 3-(4-Pyridyl)-L-alanine
  SITE 24: note = D-amino acid
  SITE 25: note = alpha-methyl-L-tyrosine
  SITE 42: note = Amidated residue

SEQ ID NO: 724 - protein, 43 aa, synthetic construct; identical to SEQ ID NO: 720
  SITE 2: note = 2-Aminoisobutyric Acid
  SITE 6: note = alpha-methyl-2-fluoro-L-phenylalanine
  SITE 10: note = 3-(4-Pyridyl)-L-alanine
  SITE 11: note = alpha-methyl-L-serine
  SITE 13: note = alpha-methyl-leucine
  SITE 16: note = L-ornithine
  SITE 17: note = Lysine is chemically modified through conjugation of the epsilon-amino group of the Lysine side chain with (gamma-Glu)2-CO-(CH2)16-CO2H
  SITE 20: note = 3-(4-Pyridyl)-L-alanine
  SITE 24: note = D-amino acid
  SITE 25: note = alpha-methyl-L-tyrosine
  SITE 43: note = Amidated residue

SEQ ID NO: 725 - protein, 42 aa, synthetic construct
  SITE 2: note = 2-Aminoisobutyric Acid
  SITE 6: note = alpha-methyl-2-fluoro-L-phenylalanine
  SITE 10: note = 3-(4-Pyridyl)-L-alanine
  SITE 11: note = alpha-methyl-L-serine
  SITE 13: note = alpha-methyl-leucine
  SITE 16: note = L-ornithine
  SITE 17: note = Lysine is chemically modified through conjugation of the epsilon-amino group of the Lysine side chain with (2-[2-(2-Amino-ethoxy)-ethoxy]-acetyl)-(gamma-Glu)-CO-(CH2) 16-CO2H
  SITE 20: note = 2-Aminoisobutyric Acid
  SITE 24: note = D-amino acid
  SITE 25: note = alpha-methyl-L-tyrosine
  SITE 42: note = Amidated residue
YXQGTXTSDXXIXLDXKAAXEFIEXLIEGGPSSGEPPPSGTE

SEQ ID NO: 726 - protein, 42 aa, synthetic construct
  SITE 2: note = 2-Aminoisobutyric Acid
  SITE 6: note = alpha-methyl-2-fluoro-L-phenylalanine
  SITE 10: note = 3-(4-Pyridyl)-L-alanine
  SITE 11: note = alpha-methyl-L-serine
  SITE 13: note = alpha-methyl-leucine
  SITE 16: note = L-ornithine
  SITE 17: note = Lysine is chemically modified through conjugation of the epsilon-amino group of the Lysine side chain with (2-[2-(2-Amino-ethoxy)-ethoxy]-acetyl)-(gamma-Glu)-CO-(CH2) 16-CO2H
  SITE 20: note = 2-Aminoisobutyric Acid
  SITE 24: note = D-amino acid
  SITE 25: note = alpha-methyl-L-tyrosine
  SITE 42: note = Amidated D-amino acid
YXQGTXTSDXXIXLDXKAAXEFIEXLIEGGPSSGEPPPSGSE

SEQ ID NO: 727 - protein, 41 aa, synthetic construct; identical to SEQ ID NO: 707
  SITE 2: note = 2-Aminoisobutyric Acid
  SITE 6: note = alpha-methyl-2-fluoro-L-phenylalanine
  SITE 10: note = 3-(4-Pyridyl)-L-alanine
  SITE 11: note = alpha-methyl-L-serine
  SITE 13: note = alpha-methyl-leucine
  SITE 16: note = L-ornithine
  SITE 17: note = Lysine is chemically modified through conjugation of the epsilon-amino group of the Lysine side chain with (2-[2-(2-Amino-ethoxy)-ethoxy]-acetyl)-(gamma-Glu)-CO-(CH2) 16-CO2H
  SITE 20: note = 2-Aminoisobutyric Acid
  SITE 24: note = D-amino acid
  SITE 25: note = alpha-methyl-L-tyrosine
  SITE 41: note = Amidated D-amino acid

SEQ ID NO: 728 - protein, 41 aa, synthetic construct
  SITE 2: note = 2-Aminoisobutyric Acid
  SITE 6: note = alpha-methyl-2-fluoro-L-phenylalanine
  SITE 10: note = 3-(4-Pyridyl)-L-alanine
  SITE 11: note = alpha-methyl-L-serine
  SITE 13: note = alpha-methyl-leucine
  SITE 16: note = L-ornithine
  SITE 17: note = Lysine is chemically modified through conjugation of the epsilon-amino group of the Lysine side chain with (2-[2-(2-Amino-ethoxy)-ethoxy]-acetyl)-(gamma-Glu)-CO-(CH2) 16-CO2H
  SITE 20: note = 2-Aminoisobutyric Acid
  SITE 24: note = D-amino acid
  SITE 25: note = alpha-methyl-L-tyrosine
  SITE 41: note = Amidated gamma-Glutamic Acid
YXQGTXTSDXXIXLDXKAAXEFIEXLIEGGPSSGAPPPSGX

SEQ ID NO: 729 - protein, 43 aa, synthetic construct; identical to SEQ ID NO: 695
  SITE 2: note = 2-Aminoisobutyric Acid
  SITE 6: note = alpha-methyl-2-fluoro-L-phenylalanine
  SITE 10: note = 3-(4-Pyridyl)-L-alanine
  SITE 11: note = alpha-methyl-L-serine
  SITE 13: note = alpha-methyl-leucine
  SITE 16: note = L-ornithine
  SITE 17: note = Lysine is chemically modified through conjugation of the epsilon-amino group of the Lysine side chain with (2-[2-(2-Amino-ethoxy)-ethoxy]-acetyl)-(gamma-Glu)-CO-(CH2) 16-CO2H
  SITE 20: note = 2-Aminoisobutyric Acid
  SITE 24: note = D-amino acid
  SITE 25: note = alpha-methyl-L-tyrosine
  SITE 43: note = Amidated D-amino acid

SEQ ID NO: 730 - protein, 43 aa, synthetic construct
  SITE 2: note = 2-Aminoisobutyric Acid
  SITE 6: note = alpha-methyl-2-fluoro-L-phenylalanine
  SITE 10: note = 3-(4-Pyridyl)-L-alanine
  SITE 11: note = alpha-methyl-L-serine
  SITE 13: note = alpha-methyl-leucine
  SITE 16: note = L-ornithine
  SITE 17: note = Lysine is chemically modified through conjugation of the epsilon-amino group of the Lysine side chain with (2-[2-(2-Amino-ethoxy)-ethoxy]-acetyl)-(gamma-Glu)-CO-(CH2) 16-CO2H
  SITE 20: note = 2-Aminoisobutyric Acid
  SITE 24: note = D-amino acid
  SITE 25: note = alpha-methyl-L-tyrosine
  SITE 43: note = Amidated gamma-Glutamic Acid
YXQGTXTSDXXIXLDXKAAXEFIEXLIEGGPSSGAPPPSGTGX

SEQ ID NO: 731 - protein, 43 aa, synthetic construct
  SITE 2: note = 2-Aminoisobutyric Acid
  SITE 6: note = alpha-methyl-2-fluoro-L-phenylalanine
  SITE 10: note = 3-(4-Pyridyl)-L-alanine
  SITE 11: note = alpha-methyl-L-serine
  SITE 13: note = alpha-methyl-leucine
  SITE 16: note = L-ornithine
  SITE 17: note = Lysine is chemically modified through conjugation of the epsilon-amino group of the Lysine side chain with (2-[2-(2-Amino-ethoxy)-ethoxy]-acetyl)-(gamma-Glu)-CO-(CH2) 16-CO2H
  SITE 20: note = 2-Aminoisobutyric Acid
  SITE 24: note = D-amino acid
  SITE 25: note = alpha-methyl-L-tyrosine
  SITE 43: note = Amidated residue
YXQGTXTSDXXIXLDXKAAXEFIEXLIEGGPSSGAPPPSGTEE

SEQ ID NO: 732 - protein, 43 aa, synthetic construct
  SITE 2: note = 2-Aminoisobutyric Acid
  SITE 6: note = alpha-methyl-2-fluoro-L-phenylalanine
  SITE 10: note = 3-(4-Pyridyl)-L-alanine
  SITE 11: note = alpha-methyl-L-serine
  SITE 13: note = alpha-methyl-leucine
  SITE 16: note = L-ornithine
  SITE 17: note = Lysine is chemically modified through conjugation of the epsilon-amino group of the Lysine side chain with (2-[2-(2-Amino-ethoxy)-ethoxy]-acetyl)-(gamma-Glu)-CO-(CH2) 16-CO2H
  SITE 20: note = 2-Aminoisobutyric Acid
  SITE 24: note = D-amino acid
  SITE 25: note = alpha-methyl-L-tyrosine
  SITE 43: note = Amidated gamma-Glutamic Acid
YXQGTXTSDXXIXLDXKAAXEFIEXLIEGGPSSGAPPPSGTEX

SEQ ID NO: 733 - protein, 41 aa, synthetic construct
  SITE 2: note = 2-Aminoisobutyric Acid
  SITE 6: note = alpha-methyl-2-fluoro-L-phenylalanine
  SITE 10: note = 3-(4-Pyridyl)-L-alanine
  SITE 13: note = alpha-methyl-leucine
  SITE 16: note = L-ornithine
  SITE 17: note = Lysine is chemically modified through conjugation of the epsilon-amino group of the Lysine side chain with (2-[2-(2-Amino-ethoxy)-ethoxy]-acetyl)-(gamma-Glu)-CO-(CH2) 16-CO2H
  SITE 20: note = 3-(4-Pyridyl)-L-alanine
  SITE 21: note = L-ornithine
  SITE 24: note = D-amino acid
  SITE 25: note = alpha-methyl-L-tyrosine
  SITE 41: note = Amidated residue
YXQGTXTSDXSIXLDXKAQXXFIEXLIEGGPSSGDPPPEGE

SEQ ID NO: 734 - protein, 41 aa, synthetic construct
  SITE 2: note = 2-Aminoisobutyric Acid
  SITE 6: note = alpha-methyl-2-fluoro-L-phenylalanine
  SITE 10: note = 3-(4-Pyridyl)-L-alanine
  SITE 13: note = alpha-methyl-leucine
  SITE 16: note = L-ornithine
  SITE 17: note = Lysine is chemically modified through conjugation of the epsilon-amino group of the Lysine side chain with (2-[2-(2-Amino-ethoxy)-ethoxy]-acetyl)-(gamma-Glu)-CO-(CH2) 16-CO2H
  SITE 20: note = 3-(4-Pyridyl)-L-alanine
  SITE 21: note = L-ornithine
  SITE 24: note = D-amino acid
  SITE 25: note = alpha-methyl-L-tyrosine
  SITE 41: note = Amidated residue
YXQGTXTSDXSIXLDXKAQXXFIEXLIEGGPSSGDPPPEAE

SEQ ID NO: 735 - protein, 41 aa, synthetic construct
  SITE 2: note = 2-Aminoisobutyric Acid
  SITE 6: note = alpha-methyl-2-fluoro-L-phenylalanine
  SITE 10: note = 3-(4-Pyridyl)-L-alanine
  SITE 13: note = alpha-methyl-leucine
  SITE 16: note = L-ornithine
  SITE 17: note = Lysine is chemically modified through conjugation of the epsilon-amino group of the Lysine side chain with (2-[2-(2-Amino-ethoxy)-ethoxy]-acetyl)-(gamma-Glu)-CO-(CH2) 16-CO2H
  SITE 20: note = 3-(4-Pyridyl)-L-alanine
  SITE 21: note = L-ornithine
  SITE 24: note = D-amino acid
  SITE 25: note = alpha-methyl-L-tyrosine
  SITE 41: note = Amidated residue
YXQGTXTSDXSIXLDXKAQXXFIEXLIEGGPSSGDPPPESE

SEQ ID NO: 736 - protein, 41 aa, synthetic construct
  SITE 2: note = 2-Aminoisobutyric Acid
  SITE 6: note = alpha-methyl-2-fluoro-L-phenylalanine
  SITE 10: note = 3-(4-Pyridyl)-L-alanine
  SITE 13: note = alpha-methyl-leucine
  SITE 16: note = L-ornithine
  SITE 17: note = Lysine is chemically modified through conjugation of the epsilon-amino group of the Lysine side chain with (2-[2-(2-Amino-ethoxy)-ethoxy]-acetyl)-(gamma-Glu)-CO-(CH2) 16-CO2H
  SITE 20: note = 3-(4-Pyridyl)-L-alanine
  SITE 21: note = L-ornithine
  SITE 24: note = D-amino acid
  SITE 25: note = alpha-methyl-L-tyrosine
  SITE 41: note = Amidated residue
YXQGTXTSDXSIXLDXKAQXXFIEXLIEGGPSSGDPPPETE

SEQ ID NO: 737 - protein, 42 aa, synthetic construct
  SITE 2: note = 2-Aminoisobutyric Acid
  SITE 6: note = alpha-methyl-2-fluoro-L-phenylalanine
  SITE 10: note = 3-(4-Pyridyl)-L-alanine
  SITE 13: note = alpha-methyl-leucine
  SITE 16: note = L-ornithine
  SITE 17: note = Lysine is chemically modified through conjugation of the epsilon-amino group of the Lysine side chain with (2-[2-(2-Amino-ethoxy)-ethoxy]-acetyl)-(gamma-Glu)-CO-(CH2) 16-CO2H
  SITE 20: note = 3-(4-Pyridyl)-L-alanine
  SITE 21: note = L-ornithine
  SITE 24: note = D-amino acid
  SITE 25: note = alpha-methyl-L-tyrosine
  SITE 42: note = Amidated residue
YXQGTXTSDXSIXLDXKAQXXFIEXLIEGGPSSGDPPPEGTE

SEQ ID NO: 738 - protein, 43 aa, synthetic construct
  SITE 2: note = 2-Aminoisobutyric Acid
  SITE 6: note = alpha-methyl-2-fluoro-L-phenylalanine
  SITE 10: note = 3-(4-Pyridyl)-L-alanine
  SITE 13: note = alpha-methyl-leucine
  SITE 16: note = L-ornithine
  SITE 17: note = Lysine is chemically modified through conjugation of the epsilon-amino group of the Lysine side chain with (2-[2-(2-Amino-ethoxy)-ethoxy]-acetyl)-(gamma-Glu)-CO-(CH2) 16-CO2H
  SITE 20: note = 3-(4-Pyridyl)-L-alanine
  SITE 21: note = L-ornithine
  SITE 24: note = D-amino acid
  SITE 25: note = alpha-methyl-L-tyrosine
  SITE 43: note = Amidated residue
YXQGTXTSDXSIXLDXKAQXXFIEXLIEGGPSSGDPPPEGTGE

SEQ ID NO: 739 - protein, 41 aa, synthetic construct
  SITE 2: note = 2-Aminoisobutyric Acid
  SITE 6: note = alpha-methyl-2-fluoro-L-phenylalanine
  SITE 10: note = 3-(4-Pyridyl)-L-alanine
  SITE 11: note = alpha-methyl-L-serine
  SITE 13: note = alpha-methyl-leucine
  SITE 16: note = L-ornithine
  SITE 17: note = Lysine is chemically modified through conjugation of the epsilon-amino group of the Lysine side chain with (2-[2-(2-Amino-ethoxy)-ethoxy]-acetyl)-(gamma-Glu)-CO-(CH2) 16-CO2H
  SITE 20: note = 3-(4-Pyridyl)-L-alanine
  SITE 24: note = D-amino acid
  SITE 25: note = alpha-methyl-L-tyrosine
  SITE 41: note = Amidated residue
YXQGTXTSDXXIXLDXKAQXEFIEXLVEGGPSSGEPPPSGS

SEQ ID NO: 740 - protein, 43 aa, synthetic construct
  SITE 2: note = 2-Aminoisobutyric Acid
  SITE 6: note = alpha-methyl-2-fluoro-L-phenylalanine
  SITE 10: note = 3-(4-Pyridyl)-L-alanine
  SITE 11: note = alpha-methyl-L-serine
  SITE 13: note = alpha-methyl-leucine
  SITE 16: note = L-ornithine
  SITE 17: note = Lysine is chemically modified through conjugation of the epsilon-amino group of the Lysine side chain with (2-[2-(2-Amino-ethoxy)-ethoxy]-acetyl)-(gamma-Glu)-CO-(CH2) 16-CO2H
  SITE 20: note = 3-(4-Pyridyl)-L-alanine
  SITE 24: note = D-amino acid
  SITE 25: note = alpha-methyl-L-tyrosine
  SITE 43: note = Amidated residue
YXQGTXTSDXXIXLDXKAQXEFIEXLVEGGPSSGEPPPSGTGE

SEQ ID NO: 741 - protein, 43 aa, synthetic construct
  SITE 2: note = 2-Aminoisobutyric Acid
  SITE 6: note = alpha-methyl-2-fluoro-L-phenylalanine
  SITE 10: note = 3-(4-Pyridyl)-L-alanine
  SITE 11: note = alpha-methyl-L-serine
  SITE 13: note = alpha-methyl-leucine
  SITE 16: note = L-ornithine
  SITE 17: note = Lysine is chemically modified through conjugation of the epsilon-amino group of the Lysine side chain with (2-[2-(2-Amino-ethoxy)-ethoxy]-acetyl)-(gamma-Glu)-CO-(CH2) 16-CO2H
  SITE 20: note = 3-(4-Pyridyl)-L-alanine
  SITE 24: note = D-amino acid
  SITE 25: note = alpha-methyl-L-tyrosine
  SITE 43: note = Amidated residue
YXQGTXTSDXXIXLDXKAQXEFIEXLVEGGPSSGEPPPSGGGE

SEQ ID NO: 742 - protein, 43 aa, synthetic construct
  SITE 2: note = 2-Aminoisobutyric Acid
  SITE 6: note = alpha-methyl-2-fluoro-L-phenylalanine
  SITE 10: note = 3-(4-Pyridyl)-L-alanine
  SITE 11: note = alpha-methyl-L-serine
  SITE 13: note = alpha-methyl-leucine
  SITE 16: note = L-ornithine
  SITE 17: note = Lysine is chemically modified through conjugation of the epsilon-amino group of the Lysine side chain with (2-[2-(2-Amino-ethoxy)-ethoxy]-acetyl)-(gamma-Glu)-CO-(CH2) 16-CO2H
  SITE 20: note = 3-(4-Pyridyl)-L-alanine
  SITE 24: note = D-amino acid
  SITE 25: note = alpha-methyl-L-tyrosine
  SITE 43: note = Amidated residue
YXQGTXTSDXXIXLDXKAQXEFIEXLVEGGPSSGEPPPSGSEE

SEQ ID NO: 743 - protein, 41 aa, synthetic construct; identical to SEQ ID NO: 739
  SITE 2: note = 2-Aminoisobutyric Acid
  SITE 6: note = alpha-methyl-2-fluoro-L-phenylalanine
  SITE 10: note = 3-(4-Pyridyl)-L-alanine
  SITE 11: note = alpha-methyl-L-serine
  SITE 13: note = alpha-methyl-leucine
  SITE 16: note = L-ornithine
  SITE 17: note = Lysine is chemically modified through conjugation of the epsilon-amino group of the Lysine side chain with (gamma-Glu)2-CO-(CH2)16-CO2H
  SITE 20: note = 3-(4-Pyridyl)-L-alanine
  SITE 24: note = D-amino acid
  SITE 25: note = alpha-methyl-L-tyrosine
  SITE 41: note = Amidated residue

SEQ ID NO: 744 - protein, 43 aa, synthetic construct; identical to SEQ ID NO: 740
  SITE 2: note = 2-Aminoisobutyric Acid
  SITE 6: note = alpha-methyl-2-fluoro-L-phenylalanine
  SITE 10: note = 3-(4-Pyridyl)-L-alanine
  SITE 11: note = alpha-methyl-L-serine
  SITE 13: note = alpha-methyl-leucine
  SITE 16: note = L-ornithine
  SITE 17: note = Lysine is chemically modified through conjugation of the epsilon-amino group of the Lysine side chain with (gamma-Glu)2-CO-(CH2)16-CO2H
  SITE 20: note = 3-(4-Pyridyl)-L-alanine
  SITE 24: note = D-amino acid
  SITE 25: note = alpha-methyl-L-tyrosine
  SITE 43: note = Amidated residue

SEQ ID NO: 745 - protein, 43 aa, synthetic construct; identical to SEQ ID NO: 741
  SITE 2: note = 2-Aminoisobutyric Acid
  SITE 6: note = alpha-methyl-2-fluoro-L-phenylalanine
  SITE 10: note = 3-(4-Pyridyl)-L-alanine
  SITE 11: note = alpha-methyl-L-serine
  SITE 13: note = alpha-methyl-leucine
  SITE 16: note = L-ornithine
  SITE 17: note = Lysine is chemically modified through conjugation of the epsilon-amino group of the Lysine side chain with (gamma-Glu)2-CO-(CH2)16-CO2H
  SITE 20: note = 3-(4-Pyridyl)-L-alanine
  SITE 24: note = D-amino acid
  SITE 25: note = alpha-methyl-L-tyrosine
  SITE 43: note = Amidated residue

SEQ ID NO: 746 - protein, 43 aa, synthetic construct; identical to SEQ ID NO: 742
  SITE 2: note = 2-Aminoisobutyric Acid
  SITE 6: note = alpha-methyl-2-fluoro-L-phenylalanine
  SITE 10: note = 3-(4-Pyridyl)-L-alanine
  SITE 11: note = alpha-methyl-L-serine
  SITE 13: note = alpha-methyl-leucine
  SITE 16: note = L-ornithine
  SITE 17: note = Lysine is chemically modified through conjugation of the epsilon-amino group of the Lysine side chain with (gamma-Glu)2-CO-(CH2)16-CO2H
  SITE 20: note = 3-(4-Pyridyl)-L-alanine
  SITE 24: note = D-amino acid
  SITE 25: note = alpha-methyl-L-tyrosine
  SITE 43: note = Amidated residue

SEQ ID NO: 747 - protein, 43 aa, synthetic construct
  SITE 2: note = 2-Aminoisobutyric Acid
  SITE 6: note = alpha-methyl-2-fluoro-L-phenylalanine
  SITE 10: note = 3-(4-Pyridyl)-L-alanine
  SITE 11: note = alpha-methyl-L-serine
  SITE 13: note = alpha-methyl-leucine
  SITE 16: note = L-ornithine
  SITE 17: note = Lysine is chemically modified through conjugation of the epsilon-amino group of the Lysine side chain with (2-[2-(2-Amino-ethoxy)-ethoxy]-acetyl)-(gamma-Glu)-CO-(CH2) 16-CO2H
  SITE 20: note = 3-(4-Pyridyl)-L-alanine
  SITE 24: note = D-amino acid
  SITE 25: note = alpha-methyl-L-tyrosine
  SITE 43: note = Amidated residue
YXQGTXTSDXXIXLDXKAQXEFIEXLIEGGPSSGAPPPSGGGE

SEQ ID NO: 748 - protein, 43 aa, synthetic construct
  SITE 2: note = 2-Aminoisobutyric Acid
  SITE 6: note = alpha-methyl-2-fluoro-L-phenylalanine
  SITE 10: note = 3-(4-Pyridyl)-L-alanine
  SITE 11: note = alpha-methyl-L-serine
  SITE 13: note = alpha-methyl-leucine
  SITE 16: note = L-ornithine
  SITE 17: note = Lysine is chemically modified through conjugation of the epsilon-amino group of the Lysine side chain with (2-[2-(2-Amino-ethoxy)-ethoxy]-acetyl)-(gamma-Glu)-CO-(CH2) 16-CO2H
  SITE 20: note = 3-(4-Pyridyl)-L-alanine
  SITE 24: note = D-amino acid
  SITE 25: note = alpha-methyl-L-tyrosine
  SITE 43: note = Amidated residue
YXQGTXTSDXXIXLDXKAQXEFIEXLIEGGPSSGEPPPSGGGE

SEQ ID NO: 749 - protein, 43 aa, synthetic construct; identical to SEQ ID NO: 747
  SITE 2: note = 2-Aminoisobutyric Acid
  SITE 6: note = alpha-methyl-2-fluoro-L-phenylalanine
  SITE 10: note = 3-(4-Pyridyl)-L-alanine
  SITE 11: note = alpha-methyl-L-serine
  SITE 13: note = alpha-methyl-leucine
  SITE 16: note = L-ornithine
  SITE 17: note = Lysine is chemically modified through conjugation of the epsilon-amino group of the Lysine side chain with (gamma-Glu)2-CO-(CH2)16-CO2H
  SITE 20: note = 3-(4-Pyridyl)-L-alanine
  SITE 24: note = D-amino acid
  SITE 25: note = alpha-methyl-L-tyrosine
  SITE 43: note = Amidated residue

SEQ ID NO: 750 - protein, 43 aa, synthetic construct; identical to SEQ ID NO: 748
  SITE 2: note = 2-Aminoisobutyric Acid
  SITE 6: note = alpha-methyl-2-fluoro-L-phenylalanine
  SITE 10: note = 3-(4-Pyridyl)-L-alanine
  SITE 11: note = alpha-methyl-L-serine
  SITE 13: note = alpha-methyl-leucine
  SITE 16: note = L-ornithine
  SITE 17: note = Lysine is chemically modified through conjugation of the epsilon-amino group of the Lysine side chain with (gamma-Glu)2-CO-(CH2)16-CO2H
  SITE 20: note = 3-(4-Pyridyl)-L-alanine
  SITE 24: note = D-amino acid
  SITE 25: note = alpha-methyl-L-tyrosine
  SITE 43: note = Amidated residue

SEQ ID NO: 751 - protein, 43 aa, synthetic construct
  SITE 2: note = 2-Aminoisobutyric Acid
  SITE 6: note = alpha-methyl-2-fluoro-L-phenylalanine
  SITE 10: note = 3-(4-Pyridyl)-L-alanine
  SITE 11: note = alpha-methyl-L-serine
  SITE 13: note = alpha-methyl-leucine
  SITE 16: note = L-ornithine
  SITE 17: note = Lysine is chemically modified through conjugation of the epsilon-amino group of the Lysine side chain with (2-[2-(2-Amino-ethoxy)-ethoxy]-acetyl)-(gamma-Glu)-CO-(CH2) 16-CO2H
  SITE 20: note = 2-Aminoisobutyric Acid
  SITE 24: note = D-amino acid
  SITE 25: note = alpha-methyl-L-tyrosine
  SITE 43: note = Amidated residue
YXQGTXTSDXXIXLDXKAAXEFIEXLIEGGPSSGAPPPSGGGE

SEQ ID NO: 752 - protein, 43 aa, synthetic construct
  SITE 2: note = 2-Aminoisobutyric Acid
  SITE 6: note = alpha-methyl-2-fluoro-L-phenylalanine
  SITE 10: note = 3-(4-Pyridyl)-L-alanine
  SITE 11: note = alpha-methyl-L-serine
  SITE 13: note = alpha-methyl-leucine
  SITE 16: note = L-ornithine
  SITE 17: note = Lysine is chemically modified through conjugation of the epsilon-amino group of the Lysine side chain with (2-[2-(2-Amino-ethoxy)-ethoxy]-acetyl)-(gamma-Glu)-CO-(CH2) 16-CO2H
  SITE 20: note = 2-Aminoisobutyric Acid
  SITE 24: note = D-amino acid
  SITE 25: note = alpha-methyl-L-tyrosine
  SITE 43: note = Amidated residue
YXQGTXTSDXXIXLDXKAAXEFIEXLIEGGPSSGEPPPSGGGE

SEQ ID NO: 753 - protein, 43 aa, synthetic construct; identical to SEQ ID NO: 751
  SITE 2: note = 2-Aminoisobutyric Acid
  SITE 6: note = alpha-methyl-2-fluoro-L-phenylalanine
  SITE 10: note = 3-(4-Pyridyl)-L-alanine
  SITE 11: note = alpha-methyl-L-serine
  SITE 13: note = alpha-methyl-leucine
  SITE 16: note = L-ornithine
  SITE 17: note = Lysine is chemically modified through conjugation of the epsilon-amino group of the Lysine side chain with (gamma-Glu)2-CO-(CH2)16-CO2H
  SITE 20: note = 2-Aminoisobutyric Acid
  SITE 24: note = D-amino acid
  SITE 25: note = alpha-methyl-L-tyrosine
  SITE 43: note = Amidated residue

SEQ ID NO: 754 - protein, 43 aa, synthetic construct; identical to SEQ ID NO: 752
  SITE 2: note = 2-Aminoisobutyric Acid
  SITE 6: note = alpha-methyl-2-fluoro-L-phenylalanine
  SITE 10: note = 3-(4-Pyridyl)-L-alanine
  SITE 11: note = alpha-methyl-L-serine
  SITE 13: note = alpha-methyl-leucine
  SITE 16: note = L-ornithine
  SITE 17: note = Lysine is chemically modified through conjugation of the epsilon-amino group of the Lysine side chain with (gamma-Glu)2-CO-(CH2)16-CO2H
  SITE 20: note = 2-Aminoisobutyric Acid
  SITE 24: note = D-amino acid
  SITE 25: note = alpha-methyl-L-tyrosine
  SITE 43: note = Amidated residue

SEQ ID NO: 755 - protein, 41 aa, synthetic construct
  SITE 2: note = 2-Aminoisobutyric Acid
  SITE 6: note = alpha-methyl-2-fluoro-L-phenylalanine
  SITE 10: note = 3-(4-Pyridyl)-L-alanine
  SITE 11: note = alpha-methyl-L-serine
  SITE 13: note = alpha-methyl-leucine
  SITE 16: note = L-ornithine
  SITE 17: note = Lysine is chemically modified through conjugation of the epsilon-amino group of the Lysine side chain with (2-[2-(2-Amino-ethoxy)-ethoxy]-acetyl)-(gamma-Glu)-CO-(CH2) 16-CO2H
  SITE 20: note = 3-(4-Pyridyl)-L-alanine
  SITE 24: note = D-amino acid
  SITE 25: note = alpha-methyl-L-tyrosine
  SITE 41: note = Amidated residue
YXQGTXTSDXXIXLDXKAQXEFIEXLVEGGPSSGAPPPSGE

SEQ ID NO: 756 - protein, 41 aa, synthetic construct
  SITE 2: note = 2-Aminoisobutyric Acid
  SITE 6: note = alpha-methyl-2-fluoro-L-phenylalanine
  SITE 10: note = 3-(4-Pyridyl)-L-alanine
  SITE 11: note = alpha-methyl-L-serine
  SITE 13: note = alpha-methyl-leucine
  SITE 16: note = L-ornithine
  SITE 17: note = Lysine is chemically modified through conjugation of the epsilon-amino group of the Lysine side chain with (2-[2-(2-Amino-ethoxy)-ethoxy]-acetyl)-(gamma-Glu)-CO-(CH2) 16-CO2H
  SITE 20: note = 3-(4-Pyridyl)-L-alanine
  SITE 24: note = D-amino acid
  SITE 25: note = alpha-methyl-L-tyrosine
  SITE 41: note = Amidated residue
YXQGTXTSDXXIXLDXKAQXEFIEXLVEGGPSSGEPPPSGE

SEQ ID NO: 757 - protein, 42 aa, synthetic construct
  SITE 2: note = 2-Aminoisobutyric Acid
  SITE 6: note = alpha-methyl-2-fluoro-L-phenylalanine
  SITE 10: note = 3-(4-Pyridyl)-L-alanine
  SITE 11: note = alpha-methyl-L-serine
  SITE 13: note = alpha-methyl-leucine
  SITE 16: note = L-ornithine
  SITE 17: note = Lysine is chemically modified through conjugation of the epsilon-amino group of the Lysine side chain with (2-[2-(2-Amino-ethoxy)-ethoxy]-acetyl)-(gamma-Glu)-CO-(CH2) 16-CO2H
  SITE 20: note = 3-(4-Pyridyl)-L-alanine
  SITE 24: note = D-amino acid
  SITE 25: note = alpha-methyl-L-tyrosine
  SITE 42: note = Amidated residue
YXQGTXTSDXXIXLDXKAQXEFIEXLVEGGPSSGAPPPSGSE

SEQ ID NO: 758 - protein, 42 aa, synthetic construct
  SITE 2: note = 2-Aminoisobutyric Acid
  SITE 6: note = alpha-methyl-2-fluoro-L-phenylalanine
  SITE 10: note = 3-(4-Pyridyl)-L-alanine
  SITE 11: note = alpha-methyl-L-serine
  SITE 13: note = alpha-methyl-leucine
  SITE 16: note = L-ornithine
  SITE 17: note = Lysine is chemically modified through conjugation of the epsilon-amino group of the Lysine side chain with (2-[2-(2-Amino-ethoxy)-ethoxy]-acetyl)-(gamma-Glu)-CO-(CH2) 16-CO2H
  SITE 20: note = 3-(4-Pyridyl)-L-alanine
  SITE 24: note = D-amino acid
  SITE 25: note = alpha-methyl-L-tyrosine
  SITE 42: note = Amidated residue
YXQGTXTSDXXIXLDXKAQXEFIEXLVEGGPSSGEPPPSGSE

SEQ ID NO: 759 - protein, 42 aa, synthetic construct
  SITE 2: note = 2-Aminoisobutyric Acid
  SITE 6: note = alpha-methyl-2-fluoro-L-phenylalanine
  SITE 10: note = 3-(4-Pyridyl)-L-alanine
  SITE 13: note = alpha-methyl-leucine
  SITE 16: note = L-ornithine
  SITE 17: note = Lysine is chemically modified through conjugation of the epsilon-amino group of the Lysine side chain with (2-[2-(2-Amino-ethoxy)-ethoxy]-acetyl)-(gamma-Glu)-CO-(CH2) 16-CO2H
  SITE 20: note = 3-(4-Pyridyl)-L-alanine
  SITE 21: note = L-ornithine
  SITE 24: note = D-amino acid
  SITE 25: note = alpha-methyl-L-tyrosine
  SITE 42: note = Amidated residue
YXQGTXTSDXSIXLDXKAQXXFIEXLIEGGPSSGEPPPESEE

SEQ ID NO: 760 - protein, 43 aa, synthetic construct
  SITE 2: note = 2-Aminoisobutyric Acid
  SITE 6: note = alpha-methyl-2-fluoro-L-phenylalanine
  SITE 10: note = 3-(4-Pyridyl)-L-alanine
  SITE 13: note = alpha-methyl-leucine
  SITE 16: note = L-ornithine
  SITE 17: note = Lysine is chemically modified through conjugation of the epsilon-amino group of the Lysine side chain with (2-[2-(2-Amino-ethoxy)-ethoxy]-acetyl)-(gamma-Glu)-CO-(CH2) 16-CO2H
  SITE 20: note = 3-(4-Pyridyl)-L-alanine
  SITE 21: note = L-ornithine
  SITE 24: note = D-amino acid
  SITE 25: note = alpha-methyl-L-tyrosine
  SITE 43: note = Amidated residue
YXQGTXTSDXSIXLDXKAQXXFIEXLIEGGPSSGEPPPESEEE

SEQ ID NO: 761 - protein, 41 aa, synthetic construct
  SITE 2: note = 2-Aminoisobutyric Acid
  SITE 6: note = alpha-methyl-2-fluoro-L-phenylalanine
  SITE 10: note = 3-(4-Pyridyl)-L-alanine
  SITE 13: note = alpha-methyl-leucine
  SITE 16: note = L-ornithine
  SITE 17: note = Lysine is chemically modified through conjugation of the epsilon-amino group of the Lysine side chain with (2-[2-(2-Amino-ethoxy)-ethoxy]-acetyl)-(gamma-Glu)-CO-(CH2) 16-CO2H
  SITE 20: note = 3-(4-Pyridyl)-L-alanine
  SITE 21: note = L-ornithine
  SITE 24: note = D-amino acid
  SITE 25: note = alpha-methyl-L-tyrosine
  SITE 41: note = Amidated residue
YXQGTXTSDXSIXLDXKAQXXFIEXLIEGGPSSGAPPPESE

SEQ ID NO: 762 - protein, 42 aa, synthetic construct
  SITE 2: note = 2-Aminoisobutyric Acid
  SITE 6: note = alpha-methyl-2-fluoro-L-phenylalanine
  SITE 10: note = 3-(4-Pyridyl)-L-alanine
  SITE 13: note = alpha-methyl-leucine
  SITE 16: note = L-ornithine
  SITE 17: note = Lysine is chemically modified through conjugation of the epsilon-amino group of the Lysine side chain with (2-[2-(2-Amino-ethoxy)-ethoxy]-acetyl)-(gamma-Glu)-CO-(CH2) 16-CO2H
  SITE 20: note = 3-(4-Pyridyl)-L-alanine
  SITE 21: note = L-ornithine
  SITE 24: note = D-amino acid
  SITE 25: note = alpha-methyl-L-tyrosine
  SITE 42: note = Amidated residue
YXQGTXTSDXSIXLDXKAQXXFIEXLIEGGPSSGAPPPESEE

SEQ ID NO: 763 - protein, 43 aa, synthetic construct
  SITE 2: note = 2-Aminoisobutyric Acid
  SITE 6: note = alpha-methyl-2-fluoro-L-phenylalanine
  SITE 10: note = 3-(4-Pyridyl)-L-alanine
  SITE 13: note = alpha-methyl-leucine
  SITE 16: note = L-ornithine
  SITE 17: note = Lysine is chemically modified through conjugation of the epsilon-amino group of the Lysine side chain with (2-[2-(2-Amino-ethoxy)-ethoxy]-acetyl)-(gamma-Glu)-CO-(CH2) 16-CO2H
  SITE 20: note = 3-(4-Pyridyl)-L-alanine
  SITE 21: note = L-ornithine
  SITE 24: note = D-amino acid
  SITE 25: note = alpha-methyl-L-tyrosine
  SITE 43: note = Amidated residue
YXQGTXTSDXSIXLDXKAQXXFIEXLIEGGPSSGEPPPEGGGE

SEQ ID NO: 764 - protein, 43 aa, synthetic construct
  SITE 2: note = 2-Aminoisobutyric Acid
  SITE 6: note = alpha-methyl-2-fluoro-L-phenylalanine
  SITE 10: note = 3-(4-Pyridyl)-L-alanine
  SITE 13: note = alpha-methyl-leucine
  SITE 16: note = L-ornithine
  SITE 17: note = Lysine is chemically modified through conjugation of the epsilon-amino group of the Lysine side chain with (2-[2-(2-Amino-ethoxy)-ethoxy]-acetyl)-(gamma-Glu)-CO-(CH2) 16-CO2H
  SITE 20: note = 3-(4-Pyridyl)-L-alanine
  SITE 21: note = L-ornithine
  SITE 24: note = D-amino acid
  SITE 25: note = alpha-methyl-L-tyrosine
  SITE 43: note = Amidated residue
YXQGTXTSDXSIXLDXKAQXXFIEXLIEGGPSSGAPPPEGGGE

SEQ ID NO: 765 - protein, 43 aa, synthetic construct
  SITE 2: note = 2-Aminoisobutyric Acid
  SITE 6: note = alpha-methyl-2-fluoro-L-phenylalanine
  SITE 10: note = 3-(4-Pyridyl)-L-alanine
  SITE 11: note = alpha-methyl-L-serine
  SITE 13: note = alpha-methyl-leucine
  SITE 16: note = L-ornithine
  SITE 17: note = Lysine is chemically modified through conjugation of the epsilon-amino group of the Lysine side chain with (2-[2-(2-Amino-ethoxy)-ethoxy]-acetyl)-(gamma-Glu)-CO-(CH2) 16-CO2H
  SITE 20: note = 3-(4-Pyridyl)-L-alanine
  SITE 24: note = D-amino acid
  SITE 25: note = alpha-methyl-L-tyrosine
  SITE 43: note = Amidated residue
YXQGTXTSDXXIXLDXKAQXEFIEXLIEGGPSSGAPPPEGGGE

SEQ ID NO: 766 - protein, 43 aa, synthetic construct
  SITE 2: note = 2-Aminoisobutyric Acid
  SITE 6: note = alpha-methyl-2-fluoro-L-phenylalanine
  SITE 10: note = 3-(4-Pyridyl)-L-alanine
  SITE 11: note = alpha-methyl-L-serine
  SITE 13: note = alpha-methyl-leucine
  SITE 16: note = L-ornithine
  SITE 17: note = Lysine is chemically modified through conjugation of the epsilon-amino group of the Lysine side chain with (2-[2-(2-Amino-ethoxy)-ethoxy]-acetyl)-(gamma-Glu)-CO-(CH2) 16-CO2H
  SITE 20: note = 3-(4-Pyridyl)-L-alanine
  SITE 24: note = D-amino acid
  SITE 25: note = alpha-methyl-L-tyrosine
  SITE 43: note = Amidated residue
YXQGTXTSDXXIXLDXKAQXEFIEXLIEGGPSSGEPPPEGGGE

SEQ ID NO: 767 - protein, 43 aa, synthetic construct; identical to SEQ ID NO: 765
  SITE 2: note = 2-Aminoisobutyric Acid
  SITE 6: note = alpha-methyl-2-fluoro-L-phenylalanine
  SITE 10: note = 3-(4-Pyridyl)-L-alanine
  SITE 11: note = alpha-methyl-L-serine
  SITE 13: note = alpha-methyl-leucine
  SITE 16: note = L-ornithine
  SITE 17: note = Lysine is chemically modified through conjugation of the epsilon-amino group of the Lysine side chain with (gamma-Glu)2-CO-(CH2)16-CO2H
  SITE 20: note = 3-(4-Pyridyl)-L-alanine
  SITE 24: note = D-amino acid
  SITE 25: note = alpha-methyl-L-tyrosine
  SITE 43: note = Amidated residue

SEQ ID NO: 768 - protein, 43 aa, synthetic construct; identical to SEQ ID NO: 766
  SITE 2: note = 2-Aminoisobutyric Acid
  SITE 6: note = alpha-methyl-2-fluoro-L-phenylalanine
  SITE 10: note = 3-(4-Pyridyl)-L-alanine
  SITE 11: note = alpha-methyl-L-serine
  SITE 13: note = alpha-methyl-leucine
  SITE 16: note = L-ornithine
  SITE 17: note = Lysine is chemically modified through conjugation of the epsilon-amino group of the Lysine side chain with (gamma-Glu)2-CO-(CH2)16-CO2H
  SITE 20: note = 3-(4-Pyridyl)-L-alanine
  SITE 24: note = D-amino acid
  SITE 25: note = alpha-methyl-L-tyrosine
  SITE 43: note = Amidated residue

SEQ ID NO: 769 - protein, 43 aa, synthetic construct
  SITE 2: note = 2-Aminoisobutyric Acid
  SITE 6: note = alpha-methyl-2-fluoro-L-phenylalanine
  SITE 10: note = 3-(4-Pyridyl)-L-alanine
  SITE 11: note = alpha-methyl-L-serine
  SITE 13: note = alpha-methyl-leucine
  SITE 16: note = L-ornithine
  SITE 17: note = Lysine is chemically modified through conjugation of the epsilon-amino group of the Lysine side chain with (2-[2-(2-Amino-ethoxy)-ethoxy]-acetyl)-(gamma-Glu)-CO-(CH2) 16-CO2H
  SITE 20: note = 3-(4-Pyridyl)-L-alanine
  SITE 24: note = D-amino acid
  SITE 25: note = alpha-methyl-L-tyrosine
  SITE 43: note = Amidated residue
YXQGTXTSDXXIXLDXKAQXEFIEXLIEGGPSSGEPPPEGTGE

SEQ ID NO: 770 - protein, 43 aa, synthetic construct
  SITE 2: note = 2-Aminoisobutyric Acid
  SITE 6: note = alpha-methyl-2-fluoro-L-phenylalanine
  SITE 10: note = 3-(4-Pyridyl)-L-alanine
  SITE 11: note = alpha-methyl-L-serine
  SITE 13: note = alpha-methyl-leucine
  SITE 16: note = L-ornithine
  SITE 17: note = Lysine is chemically modified through conjugation of the epsilon-amino group of the Lysine side chain with (gamma-Glu)2-CO-(CH2)16-CO2H
  SITE 20: note = 3-(4-Pyridyl)-L-alanine
  SITE 24: note = D-amino acid
  SITE 25: note = alpha-methyl-L-tyrosine
  SITE 43: note = Amidated residue
YXQGTXTSDXXIXLDXKAQXEFIEXLIEGGPSSGAPPPEGTGE

SEQ ID NO: 771 - protein, 41 aa, synthetic construct
  SITE 2: note = 2-Aminoisobutyric Acid
  SITE 4: note = D-amino acid
  SITE 6: note = alpha-methyl-2-fluoro-L-phenylalanine
  SITE 10: note = 3-(4-Pyridyl)-L-alanine
  SITE 13: note = alpha-methyl-leucine
  SITE 16: note = L-ornithine
  SITE 17: note = Lysine is chemically modified through conjugation of the epsilon-amino group of the Lysine side chain with (2-[2-(2-Amino-ethoxy)-ethoxy]-acetyl)-(gamma-Glu)-CO-(CH2) 16-CO2H
  SITE 20: note = 3-(4-Pyridyl)-L-alanine
  SITE 21: note = L-ornithine
  SITE 24: note = D-amino acid
  SITE 25: note = alpha-methyl-L-tyrosine
  SITE 41: note = Amidated residue
YXQATXTSDXSIXLDXKAQXXFIEXLIEGGPSSGEPPPESE

SEQ ID NO: 772 - protein, 43 aa, synthetic construct
  SITE 2: note = 2-Aminoisobutyric Acid
  SITE 4: note = D-amino acid
  SITE 6: note = alpha-methyl-2-fluoro-L-phenylalanine
  SITE 10: note = 3-(4-Pyridyl)-L-alanine
  SITE 11: note = alpha-methyl-L-serine
  SITE 13: note = alpha-methyl-leucine
  SITE 16: note = L-ornithine
  SITE 17: note = Lysine is chemically modified through conjugation of the epsilon-amino group of the Lysine side chain with (2-[2-(2-Amino-ethoxy)-ethoxy]-acetyl)-(gamma-Glu)-CO-(CH2) 16-CO2H
  SITE 20: note = 3-(4-Pyridyl)-L-alanine
  SITE 24: note = D-amino acid
  SITE 25: note = alpha-methyl-L-tyrosine
  SITE 43: note = Amidated residue
YXQATXTSDXXIXLDXKAQXEFIEXLIEGGPSSGEPPPSGTGE

SEQ ID NO: 773 - protein, 41 aa, synthetic construct
  SITE 2: note = 2-Aminoisobutyric Acid
  SITE 6: note = alpha-methyl-2-fluoro-L-phenylalanine
  SITE 10: note = 3-(4-Pyridyl)-L-alanine
  SITE 11: note = alpha-methyl-L-serine
  SITE 13: note = alpha-methyl-leucine
  SITE 16: note = L-ornithine
  SITE 17: note = Lysine is chemically modified through conjugation of the epsilon-amino group of the Lysine side chain with (2-[2-(2-Amino-ethoxy)-ethoxy]-acetyl)-(gamma-Glu)-CO-(CH2) 16-CO2H
  SITE 20: note = 3-(4-Pyridyl)-L-alanine
  SITE 24: note = D-amino acid
  SITE 25: note = alpha-methyl-L-tyrosine
  SITE 41: note = Amidated residue
YXQGTXTSDXXIXLDXKYQXEFIEXLVEGGPSSGAPPPSGS

SEQ ID NO: 774 - protein, 41 aa, synthetic construct
  SITE 2: note = 2-Aminoisobutyric Acid
  SITE 6: note = alpha-methyl-2-fluoro-L-phenylalanine
  SITE 10: note = 3-(4-Pyridyl)-L-alanine
  SITE 11: note = alpha-methyl-L-serine
  SITE 13: note = alpha-methyl-leucine
  SITE 16: note = L-ornithine
  SITE 17: note = Lysine is chemically modified through conjugation of the epsilon-amino group of the Lysine side chain with (2-[2-(2-Amino-ethoxy)-ethoxy]-acetyl)-(gamma-Glu)-CO-(CH2) 16-CO2H
  SITE 20: note = 3-(4-Pyridyl)-L-alanine
  SITE 24: note = D-amino acid
  SITE 25: note = alpha-methyl-L-tyrosine
  SITE 41: note = Amidated residue
YXQGTXTSDXXIXLEXKAQXEFIEXLVEGGPSSGAPPPSGS

SEQ ID NO: 775 - protein, 43 aa, synthetic construct
  SITE 2: note = 2-Aminoisobutyric Acid
  SITE 6: note = alpha-methyl-2-fluoro-L-phenylalanine
  SITE 10: note = 3-(4-Pyridyl)-L-alanine
  SITE 11: note = alpha-methyl-L-serine
  SITE 13: note = alpha-methyl-leucine
  SITE 16: note = L-ornithine
  SITE 17: note = Lysine is chemically modified through conjugation of the epsilon-amino group of the Lysine side chain with (2-[2-(2-Amino-ethoxy)-ethoxy]-acetyl)-(gamma-Glu)-CO-(CH2) 16-CO2H
  SITE 20: note = 3-(4-Pyridyl)-L-alanine
  SITE 24: note = D-amino acid
  SITE 25: note = alpha-methyl-L-tyrosine
  SITE 43: note = Amidated residue
YXQGTXTSDXXIXLDXKAQXEFIEXLVEGGPSSGAPPPSGGGE

SEQ ID NO: 776 - protein, 41 aa, synthetic construct
  SITE 2: note = 2-Aminoisobutyric Acid
  SITE 12: note = L-ornithine
  SITE 13: note = alpha-methyl-leucine
  SITE 17: note = Lysine is chemically modified through conjugation of the epsilon-amino group of the Lysine side chain with (gamma-Glu)2-CO-(CH2)16-CO2H
  SITE 20: note = 2-Aminoisobutyric Acid
  SITE 34: note = 2-Aminoisobutyric Acid
  SITE 41: note = Amidated residue
YXQGTFTSDFSXXLDKKAQXAFIEYLLEGGPSSXAPPPGGS

SEQ ID NO: 777 - protein, 41 aa, synthetic construct
  SITE 2: note = 2-Aminoisobutyric Acid
  SITE 12: note = L-ornithine
  SITE 13: note = alpha-methyl-leucine
  SITE 17: note = Lysine is chemically modified through conjugation of the epsilon-amino group of the Lysine side chain with (gamma-Glu)2-CO-(CH2)16-CO2H
  SITE 20: note = 2-Aminoisobutyric Acid
  SITE 35: note = 2-Aminoisobutyric Acid
  SITE 41: note = Amidated residue
YXQGTFTSDFSXXLDKKAQXAFIEYLLEGGPSSGXPPPGGS

SEQ ID NO: 778 - protein, 41 aa, synthetic construct
  SITE 2: note = 2-Aminoisobutyric Acid
  SITE 13: note = alpha-methyl-leucine
  SITE 17: note = Lysine is chemically modified through conjugation of the epsilon-amino group of the Lysine side chain with (2-[2-(2-Amino-ethoxy)-ethoxy]-acetyl)-(gamma-Glu)-CO-(CH2) 16-CO2H
  SITE 20: note = 2-Aminoisobutyric Acid
  SITE 41: note = Amidated residue
YXQGTFTSDFSQXLDKKAQXAFIEYLLAGGPSSGAPPPEGS

SEQ ID NO: 779 - protein, 41 aa, synthetic construct
  SITE 2: note = 2-Aminoisobutyric Acid
  SITE 13: note = alpha-methyl-leucine
  SITE 17: note = Lysine is chemically modified through conjugation of the epsilon-amino group of the Lysine side chain with (2-[2-(2-Amino-ethoxy)-ethoxy]-acetyl)-(gamma-Glu)-CO-(CH2) 16-CO2H
  SITE 20: note = 2-Aminoisobutyric Acid
  SITE 41: note = Amidated residue
YXQGTFTSDFSQXLDKKAQXAFIEYLLAGGPSSGEPPPSGS

SEQ ID NO: 780 - protein, 41 aa, synthetic construct
  SITE 2: note = 2-Aminoisobutyric Acid
  SITE 13: note = alpha-methyl-leucine
  SITE 17: note = Lysine is chemically modified through conjugation of the epsilon-amino group of the Lysine side chain with (2-[2-(2-Amino-ethoxy)-ethoxy]-acetyl)-(gamma-Glu)-CO-(CH2) 16-CO2H
  SITE 20: note = 2-Aminoisobutyric Acid
  SITE 41: note = Amidated residue
YXQGTFTSDFSQXLDKKAQXAFIEWLLEGGPSSGAPPPEGS

SEQ ID NO: 781 - protein, 41 aa, synthetic construct
  SITE 2: note = 2-Aminoisobutyric Acid
  SITE 13: note = alpha-methyl-leucine
  SITE 17: note = Lysine is chemically modified through conjugation of the epsilon-amino group of the Lysine side chain with (2-[2-(2-Amino-ethoxy)-ethoxy]-acetyl)-(gamma-Glu)-CO-(CH2) 16-CO2H
  SITE 20: note = 2-Aminoisobutyric Acid
  SITE 29: note = D-amino acid
  SITE 41: note = Amidated residue
YXQGTFTSDFSQXLDKKAQXAFIEYLLEAGPSSGAPPPSGS

SEQ ID NO: 782 - protein, 41 aa, synthetic construct
  SITE 2: note = 2-Aminoisobutyric Acid
  SITE 13: note = alpha-methyl-leucine
  SITE 17: note = Lysine is chemically modified through conjugation of the epsilon-amino group of the Lysine side chain with (2-[2-(2-Amino-ethoxy)-ethoxy]-acetyl)-(gamma-Glu)-CO-(CH2) 16-CO2H
  SITE 20: note = 2-Aminoisobutyric Acid
  SITE 29: note = D-amino acid
  SITE 41: note = Amidated residue
YXQGTFTSDFSQXLDKKAQXAFIEYLLEAGPSSGAPPPSGT

SEQ ID NO: 783 - protein, 41 aa, synthetic construct
  SITE 2: note = 2-Aminoisobutyric Acid
  SITE 13: note = alpha-methyl-leucine
  SITE 17: note = Lysine is chemically modified through conjugation of the epsilon-amino group of the Lysine side chain with (2-[2-(2-Amino-ethoxy)-ethoxy]-acetyl)-(gamma-Glu)-CO-(CH2) 16-CO2H
  SITE 20: note = 2-Aminoisobutyric Acid
  SITE 29: note = D-amino acid
  SITE 41: note = Amidated 3-(4-Pyridyl)-L-alanine
YXQGTFTSDFSQXLDKKAQXAFIEYLLEAGPSSGAPPPSGX

SEQ ID NO: 784 - protein, 41 aa, synthetic construct; identical to SEQ ID NO: 782
  SITE 2: note = 2-Aminoisobutyric Acid
  SITE 13: note = alpha-methyl-leucine
  SITE 17: note = Lysine is chemically modified through conjugation of the epsilon-amino group of the Lysine side chain with (2-[2-(2-Amino-ethoxy)-ethoxy]-acetyl)-(gamma-Glu)-CO-(CH2) 16-CO2H
  SITE 20: note = 2-Aminoisobutyric Acid
  SITE 29: note = D-amino acid

SEQ ID NO: 785 - protein, 41 aa, synthetic construct
  SITE 2: note = 2-Aminoisobutyric Acid
  SITE 13: note = alpha-methyl-leucine
  SITE 17: note = Lysine is chemically modified through conjugation of the epsilon-amino group of the Lysine side chain with (2-[2-(2-Amino-ethoxy)-ethoxy]-acetyl)-(gamma-Glu)-CO-(CH2) 16-CO2H
  SITE 20: note = 2-Aminoisobutyric Acid
  SITE 29: note = D-amino acid
  SITE 34: note = 2-Aminoisobutyric Acid
  SITE 41: note = Amidated residue
YXQGTFTSDFSQXLDKKAQXAFIEYLLEAGPSSXAPPPSGT

SEQ ID NO: 786 - protein, 41 aa, synthetic construct; identical to SEQ ID NO: 785
  SITE 2: note = 2-Aminoisobutyric Acid
  SITE 13: note = alpha-methyl-leucine
  SITE 17: note = Lysine is chemically modified through conjugation of the epsilon-amino group of the Lysine side chain with (2-[2-(2-Amino-ethoxy)-ethoxy]-acetyl)-(gamma-Glu)-CO-(CH2) 16-CO2H
  SITE 20: note = 2-Aminoisobutyric Acid
  SITE 29: note = D-amino acid
  SITE 34: note = 2-Aminoisobutyric Acid

SEQ ID NO: 787 - protein, 41 aa, synthetic construct
  SITE 2: note = 2-Aminoisobutyric Acid
  SITE 13: note = alpha-methyl-leucine
  SITE 17: note = Lysine is chemically modified through conjugation of the epsilon-amino group of the Lysine side chain with (2-[2-(2-Amino-ethoxy)-ethoxy]-acetyl)-(gamma-Glu)-CO-(CH2) 16-CO2H
  SITE 20: note = 2-Aminoisobutyric Acid
  SITE 29: note = 2-Aminoisobutyric Acid
  SITE 41: note = Amidated residue
YXQGTFTSDFSQXLDKKAQXAFIEYLLEXGPSSGAPPPSGT

SEQ ID NO: 788 - protein, 41 aa, synthetic construct
  SITE 2: note = 2-Aminoisobutyric Acid
  SITE 13: note = alpha-methyl-leucine
  SITE 17: note = Lysine is chemically modified through conjugation of the epsilon-amino group of the Lysine side chain with (2-[2-(2-Amino-ethoxy)-ethoxy]-acetyl)-(gamma-Glu)-CO-(CH2) 16-CO2H
  SITE 20: note = 2-Aminoisobutyric Acid
  SITE 29: note = 2-Aminoisobutyric Acid
  SITE 41: note = Amidated 3-(4-Pyridyl)-L-alanine
YXQGTFTSDFSQXLDKKAQXAFIEYLLEXGPSSGAPPPSGX

SEQ ID NO: 789 - protein, 41 aa, synthetic construct; identical to SEQ ID NO: 787
  SITE 2: note = 2-Aminoisobutyric Acid
  SITE 13: note = alpha-methyl-leucine
  SITE 17: note = Lysine is chemically modified through conjugation of the epsilon-amino group of the Lysine side chain with (2-[2-(2-Amino-ethoxy)-ethoxy]-acetyl)-(gamma-Glu)-CO-(CH2) 16-CO2H
  SITE 20: note = 2-Aminoisobutyric Acid
  SITE 29: note = 2-Aminoisobutyric Acid

SEQ ID NO: 790 - protein, 41 aa, synthetic construct; identical to SEQ ID NO: 157
  SITE 2: note = 2-Aminoisobutyric Acid
  SITE 13: note = alpha-methyl-leucine
  SITE 17: note = Lysine is chemically modified through conjugation of the epsilon-amino group of the Lysine side chain with (gamma-Glu)2-CO-(CH2)16-CO2H
  SITE 20: note = 2-Aminoisobutyric Acid
  SITE 29: note = 2-Aminoisobutyric Acid
  SITE 41: note = Amidated residue

SEQ ID NO: 791 - protein, 41 aa, synthetic construct
  SITE 2: note = 2-Aminoisobutyric Acid
  SITE 13: note = alpha-methyl-leucine
  SITE 17: note = Lysine is chemically modified through conjugation of the epsilon-amino group of the Lysine side chain with (2-[2-(2-Amino-ethoxy)-ethoxy]-acetyl)-(gamma-Glu)-CO-(CH2) 16-CO2H
  SITE 20: note = 2-Aminoisobutyric Acid
  SITE 29: note = 2-Aminoisobutyric Acid
  SITE 41: note = Amidated residue
YXQGTFTSDFSQXLDKKAQXAFIEYLLEXGESSGAPPPSGT

SEQ ID NO: 792 - protein, 41 aa, synthetic construct; identical to SEQ ID NO: 791
  SITE 2: note = 2-Aminoisobutyric Acid
  SITE 13: note = alpha-methyl-leucine
  SITE 17: note = Lysine is chemically modified through conjugation of the epsilon-amino group of the Lysine side chain with (2-[2-(2-Amino-ethoxy)-ethoxy]-acetyl)-(gamma-Glu)-CO-(CH2) 16-CO2H
  SITE 20: note = 2-Aminoisobutyric Acid
  SITE 29: note = 2-Aminoisobutyric Acid

SEQ ID NO: 793 - protein, 41 aa, synthetic construct
  SITE 2: note = 2-Aminoisobutyric Acid
  SITE 13: note = alpha-methyl-leucine
  SITE 17: note = Lysine is chemically modified through conjugation of the epsilon-amino group of the Lysine side chain with (2-[2-(2-Amino-ethoxy)-ethoxy]-acetyl)2-(gamma-Glu)-CO-(CH2 )16-CO2H
  SITE 20: note = 2-Aminoisobutyric Acid
  SITE 29: note = 2-Aminoisobutyric Acid
  SITE 41: note = Amidated residue
YXQGTFTSDFSQXLDKKAQXAFIEYLLEXGESSGAPPPSGS

SEQ ID NO: 794 - protein, 41 aa, synthetic construct
  SITE 2: note = 2-Aminoisobutyric Acid
  SITE 13: note = alpha-methyl-leucine
  SITE 17: note = Lysine is chemically modified through conjugation of the epsilon-amino group of the Lysine side chain with (2-[2-(2-Amino-ethoxy)-ethoxy]-acetyl)-(gamma-Glu)-CO-(CH2) 16-CO2H
  SITE 20: note = 2-Aminoisobutyric Acid
  SITE 29: note = 2-Aminoisobutyric Acid
  SITE 41: note = Amidated residue
YXQGTFTSDFSQXLDKKAQXAFIEYLLEXGESSGEPPPSGS

SEQ ID NO: 795 - protein, 41 aa, synthetic construct
  SITE 2: note = 2-Aminoisobutyric Acid
  SITE 13: note = alpha-methyl-leucine
  SITE 17: note = Lysine is chemically modified through conjugation of the epsilon-amino group of the Lysine side chain with (2-[2-(2-Amino-ethoxy)-ethoxy]-acetyl)-(gamma-Glu)-CO-(CH2) 16-CO2H
  SITE 20: note = 2-Aminoisobutyric Acid
  SITE 29: note = 2-Aminoisobutyric Acid
  SITE 41: note = Amidated residue
YXQGTFTSDFSQXLDKKAQXAFIEYLLEXGESSGAPPPSGE

SEQ ID NO: 796 - protein, 41 aa, synthetic construct
  SITE 2: note = 2-Aminoisobutyric Acid
  SITE 13: note = alpha-methyl-leucine
  SITE 17: note = Lysine is chemically modified through conjugation of the epsilon-amino group of the Lysine side chain with (2-[2-(2-Amino-ethoxy)-ethoxy]-acetyl)-(gamma-Glu)-CO-(CH2) 16-CO2H
  SITE 20: note = 2-Aminoisobutyric Acid
  SITE 29: note = 2-Aminoisobutyric Acid
  SITE 41: note = Amidated residue
YXQGTFTSDFSQXLDKKAQXAFIEYLLEXGESSGEPPPSGE

SEQ ID NO: 797 - protein, 41 aa, synthetic construct
  SITE 2: note = 2-Aminoisobutyric Acid
  SITE 10: note = 3-(4-Pyridyl)-L-alanine
  SITE 12: note = L-ornithine
  SITE 13: note = alpha-methyl-leucine
  SITE 17: note = Lysine is chemically modified through conjugation of the epsilon-amino group of the Lysine side chain with (2-[2-(2-Amino-ethoxy)-ethoxy]-acetyl)-(gamma-Glu)-CO-(CH2) 16-CO2H
  SITE 20: note = 3-(4-Pyridyl)-L-alanine
  SITE 41: note = Amidated residue
YXQGTFTSDXSXXLDKKAQXAFIEYLIEGGESSGAPPPSGS

SEQ ID NO: 798 - protein, 41 aa, synthetic construct
  SITE 2: note = 2-Aminoisobutyric Acid
  SITE 10: note = 3-(4-Pyridyl)-L-alanine
  SITE 13: note = alpha-methyl-leucine
  SITE 17: note = Lysine is chemically modified through conjugation of the epsilon-amino group of the Lysine side chain with (2-[2-(2-Amino-ethoxy)-ethoxy]-acetyl)-(gamma-Glu)-CO-(CH2) 16-CO2H
  SITE 20: note = 3-(4-Pyridyl)-L-alanine
  SITE 41: note = Amidated residue
YXQGTFTSDXSRXLDKKAQXAFIEYLIEGGESSGAPPPSGS

SEQ ID NO: 799 - protein, 41 aa, synthetic construct
  SITE 2: note = 2-Aminoisobutyric Acid
  SITE 10: note = 3-(4-Pyridyl)-L-alanine
  SITE 13: note = alpha-methyl-leucine
  SITE 17: note = Lysine is chemically modified through conjugation of the epsilon-amino group of the Lysine side chain with (2-[2-(2-Amino-ethoxy)-ethoxy]-acetyl)-(gamma-Glu)-CO-(CH2) 16-CO2H
  SITE 20: note = 3-(4-Pyridyl)-L-alanine
  SITE 41: note = Amidated residue
YXQGTFTSDXSQXLDKKAQXAFIEYLIEGGESSGAPPPSGS

SEQ ID NO: 800 - protein, 41 aa, synthetic construct; identical to SEQ ID NO: 226
  SITE 2: note = 2-Aminoisobutyric Acid
  SITE 13: note = alpha-methyl-leucine
  SITE 17: note = Lysine is chemically modified through conjugation of the epsilon-amino group of the Lysine side chain with (2-[2-(2-Amino-ethoxy)-ethoxy]-acetyl)-(gamma-Glu)-CO-(CH2) 16-CO2H
  SITE 20: note = 3-(4-Pyridyl)-L-alanine
  SITE 41: note = Amidated residue

SEQ ID NO: 801 - protein, 41 aa, synthetic construct
  SITE 2: note = 2-Aminoisobutyric Acid
  SITE 13: note = alpha-methyl-leucine
  SITE 17: note = Lysine is chemically modified through conjugation of the epsilon-amino group of the Lysine side chain with (2-[2-(2-Amino-ethoxy)-ethoxy]-acetyl)-(gamma-Glu)-CO-(CH2) 16-CO2H
  SITE 20: note = 3-(4-Pyridyl)-L-alanine
  SITE 41: note = Amidated residue
YXQGTFTSDFSQXLDKKAQXAFIEYLIEGGESSGAPPPSGS

SEQ ID NO: 802 - protein, 41 aa, synthetic construct
  SITE 2: note = 2-Aminoisobutyric Acid
  SITE 12: note = L-ornithine
  SITE 13: note = alpha-methyl-leucine
  SITE 17: note = Lysine is chemically modified through conjugation of the epsilon-amino group of the Lysine side chain with (2-[2-(2-Amino-ethoxy)-ethoxy]-acetyl)-(gamma-Glu)-CO-(CH2) 16-CO2H
  SITE 20: note = 2-Aminoisobutyric Acid
  SITE 29: note = 2-Aminoisobutyric Acid
  SITE 41: note = Amidated residue
YXQGTFTSDFSXXLDKKAQXAFIEYLIEXGPSSGAPPPSGS

SEQ ID NO: 803 - protein, 41 aa, synthetic construct
  SITE 2: note = 2-Aminoisobutyric Acid
  SITE 13: note = alpha-methyl-leucine
  SITE 17: note = Lysine is chemically modified through conjugation of the epsilon-amino group of the Lysine side chain with (2-[2-(2-Amino-ethoxy)-ethoxy]-acetyl)-(gamma-Glu)-CO-(CH2) 16-CO2H
  SITE 20: note = 2-Aminoisobutyric Acid
  SITE 29: note = 2-Aminoisobutyric Acid
  SITE 41: note = Amidated residue
YXQGTFTSDFSKXLDKKAQXAFIEYLIEXGPSSGAPPPSGS

SEQ ID NO: 804 - protein, 41 aa, synthetic construct
  SITE 2: note = 2-Aminoisobutyric Acid
  SITE 13: note = alpha-methyl-leucine
  SITE 17: note = Lysine is chemically modified through conjugation of the epsilon-amino group of the Lysine side chain with (2-[2-(2-Amino-ethoxy)-ethoxy]-acetyl)-(gamma-Glu)-CO-(CH2) 16-CO2H
  SITE 20: note = 2-Aminoisobutyric Acid
  SITE 29: note = 2-Aminoisobutyric Acid
  SITE 41: note = Amidated residue
YXQGTFTSDFSRXLDKKAQXAFIEYLIEXGPSSGAPPPSGS

SEQ ID NO: 805 - protein, 41 aa, synthetic construct; identical to SEQ ID NO: 802
  SITE 2: note = 2-Aminoisobutyric Acid
  SITE 12: note = (S)-2,4-diaminobutanoic acid
  SITE 13: note = alpha-methyl-leucine
  SITE 17: note = Lysine is chemically modified through conjugation of the epsilon-amino group of the Lysine side chain with (2-[2-(2-Amino-ethoxy)-ethoxy]-acetyl)-(gamma-Glu)-CO-(CH2) 16-CO2H
  SITE 20: note = 2-Aminoisobutyric Acid
  SITE 29: note = 2-Aminoisobutyric Acid
  SITE 41: note = Amidated residue

SEQ ID NO: 806 - protein, 41 aa, synthetic construct; identical to SEQ ID NO: 802
  SITE 2: note = 2-Aminoisobutyric Acid
  SITE 12: note = (S)-2,3-diaminopropanoic acid
  SITE 13: note = alpha-methyl-leucine
  SITE 17: note = Lysine is chemically modified through conjugation of the epsilon-amino group of the Lysine side chain with (2-[2-(2-Amino-ethoxy)-ethoxy]-acetyl)-(gamma-Glu)-CO-(CH2) 16-CO2H
  SITE 20: note = 2-Aminoisobutyric Acid
  SITE 29: note = 2-Aminoisobutyric Acid
  SITE 41: note = Amidated residue

SEQ ID NO: 807 - protein, 41 aa, synthetic construct
  SITE 2: note = 2-Aminoisobutyric Acid
  SITE 10: note = 3-(4-Pyridyl)-L-alanine
  SITE 13: note = alpha-methyl-leucine
  SITE 17: note = Lysine is chemically modified through conjugation of the epsilon-amino group of the Lysine side chain with (2-[2-(2-Amino-ethoxy)-ethoxy]-acetyl)-(gamma-Glu)-CO-(CH2) 16-CO2H
  SITE 20: note = 2-Aminoisobutyric Acid
  SITE 29: note = 2-Aminoisobutyric Acid
  SITE 41: note = Amidated residue
YXQGTFTSDXSKXLDKKAQXAFIEYLIEXGPSSGAPPPSGS

SEQ ID NO: 808 - protein, 41 aa, synthetic construct
  SITE 2: note = 2-Aminoisobutyric Acid
  SITE 10: note = 3-(4-Pyridyl)-L-alanine
  SITE 13: note = alpha-methyl-leucine
  SITE 17: note = Lysine is chemically modified through conjugation of the epsilon-amino group of the Lysine side chain with (2-[2-(2-Amino-ethoxy)-ethoxy]-acetyl)-(gamma-Glu)-CO-(CH2) 16-CO2H
  SITE 20: note = 2-Aminoisobutyric Acid
  SITE 29: note = 2-Aminoisobutyric Acid
  SITE 41: note = Amidated residue
YXQGTFTSDXSRXLDKKAQXAFIEYLIEXGPSSGAPPPSGS

SEQ ID NO: 809 - protein, 41 aa, synthetic construct
  SITE 2: note = 2-Aminoisobutyric Acid
  SITE 10: note = 3-(4-Pyridyl)-L-alanine
  SITE 12: note = (S)-2,4-diaminobutanoic acid
  SITE 13: note = alpha-methyl-leucine
  SITE 17: note = Lysine is chemically modified through conjugation of the epsilon-amino group of the Lysine side chain with (2-[2-(2-Amino-ethoxy)-ethoxy]-acetyl)-(gamma-Glu)-CO-(CH2) 16-CO2H
  SITE 20: note = 2-Aminoisobutyric Acid
  SITE 29: note = 2-Aminoisobutyric Acid
  SITE 41: note = Amidated residue
YXQGTFTSDXSXXLDKKAQXAFIEYLIEXGPSSGAPPPSGS

SEQ ID NO: 810 - protein, 41 aa, synthetic construct
  SITE 2: note = 2-Aminoisobutyric Acid
  SITE 12: note = L-ornithine
  SITE 13: note = alpha-methyl-leucine
  SITE 17: note = Lysine is chemically modified through conjugation of the epsilon-amino group of the Lysine side chain with (2-[2-(2-Amino-ethoxy)-ethoxy]-acetyl)-(gamma-Glu)-CO-(CH2) 16-CO2H
  SITE 20: note = 2-Aminoisobutyric Acid
  SITE 29: note = 2-Aminoisobutyric Acid
  SITE 41: note = Amidated residue
YXQGTFTSDFSXXLDKKAQXAFIEYLIEXSPSSGAPPPSGS

SEQ ID NO: 811 - protein, 41 aa, synthetic construct
  SITE 2: note = 2-Aminoisobutyric Acid
  SITE 13: note = alpha-methyl-leucine
  SITE 17: note = Lysine is chemically modified through conjugation of the epsilon-amino group of the Lysine side chain with (2-[2-(2-Amino-ethoxy)-ethoxy]-acetyl)-(gamma-Glu)-CO-(CH2) 16-CO2H
  SITE 20: note = 2-Aminoisobutyric Acid
  SITE 29: note = 2-Aminoisobutyric Acid
  SITE 41: note = Amidated residue
YXQGTFTSDFSKXLDKKAQXAFIEYLIEXSPSSGAPPPSGS

SEQ ID NO: 812 - protein, 41 aa, synthetic construct
  SITE 2: note = 2-Aminoisobutyric Acid
  SITE 13: note = alpha-methyl-leucine
  SITE 17: note = Lysine is chemically modified through conjugation of the epsilon-amino group of the Lysine side chain with (2-[2-(2-Amino-ethoxy)-ethoxy]-acetyl)-(gamma-Glu)-CO-(CH2) 16-CO2H
  SITE 20: note = 2-Aminoisobutyric Acid
  SITE 29: note = 2-Aminoisobutyric Acid
  SITE 41: note = Amidated residue
YXQGTFTSDFSRXLDKKAQXAFIEYLIEXSPSSGAPPPSGS

SEQ ID NO: 813 - protein, 41 aa, synthetic construct
  SITE 2: note = 2-Aminoisobutyric Acid
  SITE 10: note = 3-(4-Pyridyl)-L-alanine
  SITE 13: note = alpha-methyl-leucine
  SITE 17: note = Lysine is chemically modified through conjugation of the epsilon-amino group of the Lysine side chain with (2-[2-(2-Amino-ethoxy)-ethoxy]-acetyl)-(gamma-Glu)-CO-(CH2) 16-CO2H
  SITE 20: note = 2-Aminoisobutyric Acid
  SITE 29: note = 2-Aminoisobutyric Acid
  SITE 41: note = Amidated residue
YXQGTFTSDXSRXLDKKAQXAFIEYLIEXSPSSGAPPPSGS

SEQ ID NO: 814 - protein, 41 aa, synthetic construct; identical to SEQ ID NO: 809
  SITE 2: note = 2-Aminoisobutyric Acid
  SITE 10: note = 3-(4-Pyridyl)-L-alanine
  SITE 12: note = L-ornithine
  SITE 13: note = alpha-methyl-leucine
  SITE 17: note = Lysine is chemically modified through conjugation of the epsilon-amino group of the Lysine side chain with (2-[2-(2-Amino-ethoxy)-ethoxy]-acetyl)-(gamma-Glu)-CO-(CH2) 16-CO2H
  SITE 20: note = 3-(4-Pyridyl)-L-alanine
  SITE 29: note = 2-Aminoisobutyric Acid
  SITE 41: note = Amidated residue

SEQ ID NO: 815 - protein, 41 aa, synthetic construct; identical to SEQ ID NO: 808
  SITE 2: note = 2-Aminoisobutyric Acid
  SITE 10: note = 3-(4-Pyridyl)-L-alanine
  SITE 13: note = alpha-methyl-leucine
  SITE 17: note = Lysine is chemically modified through conjugation of the epsilon-amino group of the Lysine side chain with (2-[2-(2-Amino-ethoxy)-ethoxy]-acetyl)-(gamma-Glu)-CO-(CH2) 16-CO2H
  SITE 20: note = 3-(4-Pyridyl)-L-alanine
  SITE 29: note = 2-Aminoisobutyric Acid
  SITE 41: note = Amidated residue

SEQ ID NO: 816 - protein, 41 aa, synthetic construct
  SITE 2: note = 2-Aminoisobutyric Acid
  SITE 10: note = 3-(4-Pyridyl)-L-alanine
  SITE 13: note = alpha-methyl-leucine
  SITE 17: note = Lysine is chemically modified through conjugation of the epsilon-amino group of the Lysine side chain with (2-[2-(2-Amino-ethoxy)-ethoxy]-acetyl)-(gamma-Glu)-CO-(CH2) 16-CO2H
  SITE 20: note = 3-(4-Pyridyl)-L-alanine
  SITE 29: note = 2-Aminoisobutyric Acid
  SITE 41: note = Amidated residue
YXQGTFTSDXSQXLDKKAQXAFIEYLIEXGPSSGAPPPSGS

SEQ ID NO: 817 - protein, 41 aa, synthetic construct; identical to SEQ ID NO: 802
  SITE 2: note = 2-Aminoisobutyric Acid
  SITE 12: note = L-ornithine
  SITE 13: note = alpha-methyl-leucine
  SITE 17: note = Lysine is chemically modified through conjugation of the epsilon-amino group of the Lysine side chain with (2-[2-(2-Amino-ethoxy)-ethoxy]-acetyl)-(gamma-Glu)-CO-(CH2) 16-CO2H
  SITE 20: note = 3-(4-Pyridyl)-L-alanine
  SITE 29: note = 2-Aminoisobutyric Acid
  SITE 41: note = Amidated residue

SEQ ID NO: 818 - protein, 41 aa, synthetic construct; identical to SEQ ID NO: 804
  SITE 2: note = 2-Aminoisobutyric Acid
  SITE 13: note = alpha-methyl-leucine
  SITE 17: note = Lysine is chemically modified through conjugation of the epsilon-amino group of the Lysine side chain with (2-[2-(2-Amino-ethoxy)-ethoxy]-acetyl)-(gamma-Glu)-CO-(CH2) 16-CO2H
  SITE 20: note = 3-(4-Pyridyl)-L-alanine
  SITE 29: note = 2-Aminoisobutyric Acid
  SITE 41: note = Amidated residue

SEQ ID NO: 819 - protein, 41 aa, synthetic construct
  SITE 2: note = 2-Aminoisobutyric Acid
  SITE 13: note = alpha-methyl-leucine
  SITE 17: note = Lysine is chemically modified through conjugation of the epsilon-amino group of the Lysine side chain with (2-[2-(2-Amino-ethoxy)-ethoxy]-acetyl)-(gamma-Glu)-CO-(CH2) 16-CO2H
  SITE 20: note = 3-(4-Pyridyl)-L-alanine
  SITE 29: note = 2-Aminoisobutyric Acid
  SITE 41: note = Amidated residue
YXQGTFTSDFSQXLDKKAQXAFIEYLIEXGPSSGAPPPSGS

SEQ ID NO: 820 - protein, 41 aa, synthetic construct; identical to SEQ ID NO: 809
  SITE 2: note = 2-Aminoisobutyric Acid
  SITE 10: note = 3-(4-Pyridyl)-L-alanine
  SITE 12: note = L-ornithine
  SITE 13: note = alpha-methyl-leucine
  SITE 17: note = Lysine is chemically modified through conjugation of the epsilon-amino group of the Lysine side chain with (2-[2-(2-Amino-ethoxy)-ethoxy]-acetyl)2-(gamma-Glu)-CO-(CH2 )16-CO2H
  SITE 20: note = 3-(4-Pyridyl)-L-alanine
  SITE 29: note = 2-Aminoisobutyric Acid
  SITE 41: note = Amidated residue

SEQ ID NO: 821 - protein, 41 aa, synthetic construct; identical to SEQ ID NO: 808
  SITE 2: note = 2-Aminoisobutyric Acid
  SITE 10: note = 3-(4-Pyridyl)-L-alanine
  SITE 13: note = alpha-methyl-leucine
  SITE 17: note = Lysine is chemically modified through conjugation of the epsilon-amino group of the Lysine side chain with (2-[2-(2-Amino-ethoxy)-ethoxy]-acetyl)2-(gamma-Glu)-CO-(CH2 )16-CO2H
  SITE 20: note = 3-(4-Pyridyl)-L-alanine
  SITE 29: note = 2-Aminoisobutyric Acid
  SITE 41: note = Amidated residue

SEQ ID NO: 822 - protein, 41 aa, synthetic construct; identical to SEQ ID NO: 816
  SITE 2: note = 2-Aminoisobutyric Acid
  SITE 10: note = 3-(4-Pyridyl)-L-alanine
  SITE 13: note = alpha-methyl-leucine
  SITE 17: note = Lysine is chemically modified through conjugation of the epsilon-amino group of the Lysine side chain with (2-[2-(2-Amino-ethoxy)-ethoxy]-acetyl)2-(gamma-Glu)-CO-(CH2 )16-CO2H
  SITE 20: note = 3-(4-Pyridyl)-L-alanine
  SITE 29: note = 2-Aminoisobutyric Acid
  SITE 41: note = Amidated residue

SEQ ID NO: 823 - protein, 41 aa, synthetic construct; identical to SEQ ID NO: 819
  SITE 2: note = 2-Aminoisobutyric Acid
  SITE 13: note = alpha-methyl-leucine
  SITE 17: note = Lysine is chemically modified through conjugation of the epsilon-amino group of the Lysine side chain with (2-[2-(2-Amino-ethoxy)-ethoxy]-acetyl)2-(gamma-Glu)-CO-(CH2 )16-CO2H
  SITE 20: note = 3-(4-Pyridyl)-L-alanine
  SITE 29: note = 2-Aminoisobutyric Acid
  SITE 41: note = Amidated residue

SEQ ID NO: 824 - protein, 41 aa, synthetic construct
  SITE 2: note = 2-Aminoisobutyric Acid
  SITE 13: note = alpha-methyl-leucine
  SITE 16: note = L-ornithine
  SITE 17: note = Lysine is chemically modified through conjugation of the epsilon-amino group of the Lysine side chain with (2-[2-(2-Amino-ethoxy)-ethoxy]-acetyl)-(gamma-Glu)-CO-(CH2) 16-CO2H
  SITE 20: note = 3-(4-Pyridyl)-L-alanine
  SITE 29: note = 2-Aminoisobutyric Acid
  SITE 41: note = Amidated residue
YXQGTFTSDFSQXLDXKAQXAFIEYLIEXGPSSGAPPPSGS

SEQ ID NO: 825 - protein, 41 aa, synthetic construct; identical to SEQ ID NO: 819
  SITE 2: note = 2-Aminoisobutyric Acid
  SITE 13: note = alpha-methyl-leucine
  SITE 17: note = Lysine is chemically modified through conjugation of the epsilon-amino group of the Lysine side chain with (2-[2-(2-Amino-ethoxy)-ethoxy]-acetyl)-(gamma-Glu)2-CO-(CH2 )16-CO2H
  SITE 20: note = 3-(4-Pyridyl)-L-alanine
  SITE 29: note = 2-Aminoisobutyric Acid
  SITE 41: note = Amidated residue

SEQ ID NO: 826 - protein, 41 aa, synthetic construct
  SITE 2: note = 2-Aminoisobutyric Acid
  SITE 10: note = 3-(4-Pyridyl)-L-alanine
  SITE 13: note = alpha-methyl-leucine
  SITE 17: note = Lysine is chemically modified through conjugation of the epsilon-amino group of the Lysine side chain with (2-[2-(2-Amino-ethoxy)-ethoxy]-acetyl)-(gamma-Glu)-CO-(CH2) 16-CO2H
  SITE 20: note = 2-Aminoisobutyric Acid
  SITE 29: note = D-amino acid
  SITE 41: note = Amidated residue
YXQGTFTSDXSQXLDKKAQXAFIEYLLEAGPSSGAPPPSGS

SEQ ID NO: 827 - protein, 40 aa, synthetic construct
  SITE 2: note = 2-Aminoisobutyric Acid
  SITE 10: note = 3-(4-Pyridyl)-L-alanine
  SITE 13: note = alpha-methyl-leucine
  SITE 16: note = Lysine is chemically modified through conjugation of the epsilon-amino group of the Lysine side chain with (2-[2-(2-Amino-ethoxy)-ethoxy]-acetyl)-(gamma-Glu)-CO-(CH2) 16-CO2H
  SITE 19: note = 2-Aminoisobutyric Acid
  SITE 28: note = D-amino acid
  SITE 40: note = Amidated residue
YXQGTFTSDXSQXLDKAQXAFIEYLLEAGPSSGAPPPSGT

SEQ ID NO: 828 - protein, 41 aa, synthetic construct
  SITE 2: note = 2-Aminoisobutyric Acid
  SITE 10: note = 3-(4-Pyridyl)-L-alanine
  SITE 13: note = alpha-methyl-leucine
  SITE 17: note = Lysine is chemically modified through conjugation of the epsilon-amino group of the Lysine side chain with (2-[2-(2-Amino-ethoxy)-ethoxy]-acetyl)-(gamma-Glu)-CO-(CH2) 16-CO2H
  SITE 20: note = 2-Aminoisobutyric Acid
  SITE 29: note = D-amino acid
  SITE 41: note = Amidated 3-(4-Pyridyl)-L-alanine
YXQGTFTSDXSQXLDKKAQXAFIEYLLEAGPSSGAPPPSGX

SEQ ID NO: 829 - protein, 41 aa, synthetic construct
  SITE 2: note = 2-Aminoisobutyric Acid
  SITE 10: note = 3-(4-Pyridyl)-L-alanine
  SITE 13: note = alpha-methyl-leucine
  SITE 17: note = Lysine is chemically modified through conjugation of the epsilon-amino group of the Lysine side chain with (2-[2-(2-Amino-ethoxy)-ethoxy]-acetyl)-(gamma-Glu)-CO-(CH2) 16-CO2H
  SITE 20: note = 2-Aminoisobutyric Acid
  SITE 29: note = D-amino acid
YXQGTFTSDXSQXLDKKAQXAFIEYLLEAGPSSGAPPPSGT

SEQ ID NO: 830 - protein, 41 aa, synthetic construct
  SITE 2: note = 2-Aminoisobutyric Acid
  SITE 10: note = 3-(4-Pyridyl)-L-alanine
  SITE 13: note = alpha-methyl-leucine
  SITE 17: note = Lysine is chemically modified through conjugation of the epsilon-amino group of the Lysine side chain with (2-[2-(2-Amino-ethoxy)-ethoxy]-acetyl)-(gamma-Glu)-CO-(CH2) 16-CO2H
  SITE 20: note = 2-Aminoisobutyric Acid
  SITE 29: note = D-amino acid
  SITE 34: note = 2-Aminoisobutyric Acid
YXQGTFTSDXSQXLDKKAQXAFIEYLLEAGPSSXAPPPSGT

SEQ ID NO: 831 - protein, 41 aa, synthetic construct; identical to SEQ ID NO: 830
  SITE 2: note = 2-Aminoisobutyric Acid
  SITE 10: note = 3-(4-Pyridyl)-L-alanine
  SITE 13: note = alpha-methyl-leucine
  SITE 17: note = Lysine is chemically modified through conjugation of the epsilon-amino group of the Lysine side chain with (2-[2-(2-Amino-ethoxy)-ethoxy]-acetyl)-(gamma-Glu)-CO-(CH2) 16-CO2H
  SITE 20: note = 2-Aminoisobutyric Acid
  SITE 29: note = D-amino acid
  SITE 34: note = 2-Aminoisobutyric Acid

SEQ ID NO: 832 - protein, 41 aa, synthetic construct
  SITE 2: note = 2-Aminoisobutyric Acid
  SITE 10: note = 3-(4-Pyridyl)-L-alanine
  SITE 13: note = alpha-methyl-leucine
  SITE 17: note = Lysine is chemically modified through conjugation of the epsilon-amino group of the Lysine side chain with (2-[2-(2-Amino-ethoxy)-ethoxy]-acetyl)-(gamma-Glu)-CO-(CH2) 16-CO2H
  SITE 20: note = 3-(4-Pyridyl)-L-alanine
  SITE 41: note = Amidated residue
YXQGTFTSDXSQXLDKKAQXAFIEYLIEGGPSSGAPPPSGS

SEQ ID NO: 833 - protein, 41 aa, synthetic construct
  SITE 2: note = 2-Aminoisobutyric Acid
  SITE 10: note = 3-(4-Pyridyl)-L-alanine
  SITE 13: note = alpha-methyl-leucine
  SITE 17: note = Lysine is chemically modified through conjugation of the epsilon-amino group of the Lysine side chain with (2-[2-(2-Amino-ethoxy)-ethoxy]-acetyl)-(gamma-Glu)-CO-(CH2) 16-CO2H
  SITE 20: note = 3-(4-Pyridyl)-L-alanine
  SITE 41: note = Amidated residue
YXQGTFTSDXSQXLDKKAQXAFIEYLIAGGPSSGAPPPSGS

SEQ ID NO: 834 - protein, 41 aa, synthetic construct
  SITE 2: note = 2-Aminoisobutyric Acid
  SITE 10: note = 3-(4-Pyridyl)-L-alanine
  SITE 13: note = alpha-methyl-leucine
  SITE 17: note = Lysine is chemically modified through conjugation of the epsilon-amino group of the Lysine side chain with (2-[2-(2-Amino-ethoxy)-ethoxy]-acetyl)-(gamma-Glu)-CO-(CH2) 16-CO2H
  SITE 20: note = 3-(4-Pyridyl)-L-alanine
  SITE 41: note = Amidated residue
YXQGTFTSDXSQXLDKKAQXAFIEYLIAGGPSSGEPPPSGS

SEQ ID NO: 835 - protein, 41 aa, synthetic construct
  SITE 2: note = 2-Aminoisobutyric Acid
  SITE 10: note = 3-(4-Pyridyl)-L-alanine
  SITE 13: note = alpha-methyl-leucine
  SITE 17: note = Lysine is chemically modified through conjugation of the epsilon-amino group of the Lysine side chain with (2-[2-(2-Amino-ethoxy)-ethoxy]-acetyl)-(gamma-Glu)-CO-(CH2) 16-CO2H
  SITE 20: note = 3-(4-Pyridyl)-L-alanine
  SITE 29: note = D-amino acid
  SITE 41: note = Amidated residue
YXQGTFTSDXSQXLDKKAQXAFIEYLIEAGPSSGAPPPSGS

SEQ ID NO: 836 - protein, 41 aa, synthetic construct
  SITE 2: note = 2-Aminoisobutyric Acid
  SITE 10: note = 3-(4-Pyridyl)-L-alanine
  SITE 13: note = alpha-methyl-leucine
  SITE 17: note = Lysine is chemically modified through conjugation of the epsilon-amino group of the Lysine side chain with (2-[2-(2-Amino-ethoxy)-ethoxy]-acetyl)-(gamma-Glu)-CO-(CH2) 16-CO2H
  SITE 20: note = 3-(4-Pyridyl)-L-alanine
  SITE 41: note = Amidated residue
YXQGTFTSDXSQXLDKKAQXAFIEWLIEGGPSSGAPPPSGS

SEQ ID NO: 837 - protein, 41 aa, synthetic construct
  SITE 2: note = 2-Aminoisobutyric Acid
  SITE 10: note = 3-(4-Pyridyl)-L-alanine
  SITE 13: note = alpha-methyl-leucine
  SITE 17: note = Lysine is chemically modified through conjugation of the epsilon-amino group of the Lysine side chain with (2-[2-(2-Amino-ethoxy)-ethoxy]-acetyl)-(gamma-Glu)-CO-(CH2) 16-CO2H
  SITE 20: note = 3-(4-Pyridyl)-L-alanine
  SITE 41: note = Amidated residue
YXQGTFTSDXSQXLDKKAQXAFIEWLIEGGPSSGAPPPSGT

SEQ ID NO: 838 - protein, 41 aa, synthetic construct
  SITE 2: note = 2-Aminoisobutyric Acid
  SITE 10: note = 3-(4-Pyridyl)-L-alanine
  SITE 13: note = alpha-methyl-leucine
  SITE 17: note = Lysine is chemically modified through conjugation of the epsilon-amino group of the Lysine side chain with (2-[2-(2-Amino-ethoxy)-ethoxy]-acetyl)-(gamma-Glu)-CO-(CH2) 16-CO2H
  SITE 20: note = 3-(4-Pyridyl)-L-alanine
  SITE 41: note = Amidated 3-(4-Pyridyl)-L-alanine
YXQGTFTSDXSQXLDKKAQXAFIEWLIEGGPSSGAPPPSGX

SEQ ID NO: 839 - protein, 41 aa, synthetic construct
  SITE 2: note = 2-Aminoisobutyric Acid
  SITE 10: note = 3-(4-Pyridyl)-L-alanine
  SITE 13: note = alpha-methyl-leucine
  SITE 16: note = L-ornithine
  SITE 17: note = Lysine is chemically modified through conjugation of the epsilon-amino group of the Lysine side chain with (2-[2-(2-Amino-ethoxy)-ethoxy]-acetyl)-(gamma-Glu)2-CO-(CH2 )16-CO2H
  SITE 20: note = 3-(4-Pyridyl)-L-alanine
  SITE 29: note = 2-Aminoisobutyric Acid
  SITE 41: note = Amidated residue
YXQGTFTSDXSQXLDXKAQXAFIEYLIEXGPSSGAPPPSGS

SEQ ID NO: 840 - protein, 41 aa, synthetic construct
  SITE 2: note = 2-Aminoisobutyric Acid
  SITE 10: note = 3-(4-Pyridyl)-L-alanine
  SITE 13: note = alpha-methyl-leucine
  SITE 17: note = Lysine is chemically modified through conjugation of the epsilon-amino group of the Lysine side chain with (2-[2-(2-Amino-ethoxy)-ethoxy]-acetyl)-(gamma-Glu)-CO-(CH2) 16-CO2H
  SITE 20: note = 3-(4-Pyridyl)-L-alanine
  SITE 29: note = 2-Aminoisobutyric Acid
  SITE 41: note = Amidated residue
YXQGTFTSDXSQXLDKKAQXAFIEYLIEXGPSSGAPPPSGT

SEQ ID NO: 841 - protein, 41 aa, synthetic construct
  SITE 2: note = 2-Aminoisobutyric Acid
  SITE 10: note = 3-(4-Pyridyl)-L-alanine
  SITE 13: note = alpha-methyl-leucine
  SITE 17: note = Lysine is chemically modified through conjugation of the epsilon-amino group of the Lysine side chain with (2-[2-(2-Amino-ethoxy)-ethoxy]-acetyl)-(gamma-Glu)-CO-(CH2) 16-CO2H
  SITE 20: note = 3-(4-Pyridyl)-L-alanine
  SITE 29: note = 2-Aminoisobutyric Acid
  SITE 41: note = Amidated 3-(4-Pyridyl)-L-alanine
YXQGTFTSDXSQXLDKKAQXAFIEYLIEXGPSSGAPPPSGX

SEQ ID NO: 842 - protein, 41 aa, synthetic construct; identical to SEQ ID NO: 503
  SITE 2: note = 2-Aminoisobutyric Acid
  SITE 10: note = 3-(4-Pyridyl)-L-alanine
  SITE 12: note = L-ornithine
  SITE 13: note = alpha-methyl-leucine
  SITE 17: note = Lysine is chemically modified through conjugation of the epsilon-amino group of the Lysine side chain with (2-[2-(2-Amino-ethoxy)-ethoxy]-acetyl)-(gamma-Glu)-CO-(CH2) 16-CO2H
  SITE 20: note = 2-Aminoisobutyric Acid
  SITE 25: note = alpha-methyl-L-tyrosine
  SITE 41: note = Amidated residue

SEQ ID NO: 843 - protein, 41 aa, synthetic construct
  SITE 2: note = 2-Aminoisobutyric Acid
  SITE 10: note = 3-(4-Pyridyl)-L-alanine
  SITE 13: note = alpha-methyl-leucine
  SITE 17: note = Lysine is chemically modified through conjugation of the epsilon-amino group of the Lysine side chain with (2-[2-(2-Amino-ethoxy)-ethoxy]-acetyl)-(gamma-Glu)-CO-(CH2) 16-CO2H
  SITE 20: note = 2-Aminoisobutyric Acid
  SITE 25: note = alpha-methyl-L-tyrosine
  SITE 41: note = Amidated residue
YXQGTFTSDXSRXLDKKAQXAFIEXLIEGGPSSGAPPPSGS

SEQ ID NO: 844 - protein, 41 aa, synthetic construct
  SITE 2: note = 2-Aminoisobutyric Acid
  SITE 10: note = 3-(4-Pyridyl)-L-alanine
  SITE 13: note = alpha-methyl-leucine
  SITE 17: note = Lysine is chemically modified through conjugation of the epsilon-amino group of the Lysine side chain with (2-[2-(2-Amino-ethoxy)-ethoxy]-acetyl)-(gamma-Glu)-CO-(CH2) 16-CO2H
  SITE 20: note = 2-Aminoisobutyric Acid
  SITE 25: note = alpha-methyl-L-tyrosine
  SITE 41: note = Amidated residue
YXQGTFTSDXSQXLDKKAQXAFIEXLIEGGPSSGAPPPSGS

SEQ ID NO: 845 - protein, 41 aa, synthetic construct
  SITE 2: note = 2-Aminoisobutyric Acid
  SITE 12: note = L-ornithine
  SITE 13: note = alpha-methyl-leucine
  SITE 17: note = Lysine is chemically modified through conjugation of the epsilon-amino group of the Lysine side chain with (2-[2-(2-Amino-ethoxy)-ethoxy]-acetyl)-(gamma-Glu)-CO-(CH2) 16-CO2H
  SITE 20: note = 2-Aminoisobutyric Acid
  SITE 25: note = alpha-methyl-L-tyrosine
  SITE 41: note = Amidated residue
YXQGTFTSDFSXXLDKKAQXAFIEXLIEGGPSSGAPPPSGS

SEQ ID NO: 846 - protein, 41 aa, synthetic construct
  SITE 2: note = 2-Aminoisobutyric Acid
  SITE 13: note = alpha-methyl-leucine
  SITE 17: note = Lysine is chemically modified through conjugation of the epsilon-amino group of the Lysine side chain with (2-[2-(2-Amino-ethoxy)-ethoxy]-acetyl)-(gamma-Glu)-CO-(CH2) 16-CO2H
  SITE 20: note = 2-Aminoisobutyric Acid
  SITE 25: note = alpha-methyl-L-tyrosine
  SITE 41: note = Amidated residue
YXQGTFTSDFSRXLDKKAQXAFIEXLIEGGPSSGAPPPSGS

SEQ ID NO: 847 - protein, 41 aa, synthetic construct
  SITE 2: note = 2-Aminoisobutyric Acid
  SITE 13: note = alpha-methyl-leucine
  SITE 17: note = Lysine is chemically modified through conjugation of the epsilon-amino group of the Lysine side chain with (2-[2-(2-Amino-ethoxy)-ethoxy]-acetyl)-(gamma-Glu)-CO-(CH2) 16-CO2H
  SITE 20: note = 2-Aminoisobutyric Acid
  SITE 25: note = alpha-methyl-L-tyrosine
  SITE 41: note = Amidated residue
YXQGTFTSDFSQXLDKKAQXAFIEXLIEGGPSSGAPPPSGS

SEQ ID NO: 848 - protein, 41 aa, synthetic construct; identical to SEQ ID NO: 503
  SITE 2: note = 2-Aminoisobutyric Acid
  SITE 10: note = 3-(4-Pyridyl)-L-alanine
  SITE 12: note = L-ornithine
  SITE 13: note = alpha-methyl-leucine
  SITE 17: note = Lysine is chemically modified through conjugation of the epsilon-amino group of the Lysine side chain with (2-[2-(2-Amino-ethoxy)-ethoxy]-acetyl)-(gamma-Glu)-CO-(CH2) 16-CO2H
  SITE 20: note = 3-(4-Pyridyl)-L-alanine
  SITE 25: note = alpha-methyl-L-tyrosine
  SITE 41: note = Amidated residue

SEQ ID NO: 849 - protein, 41 aa, synthetic construct; identical to SEQ ID NO: 843
  SITE 2: note = 2-Aminoisobutyric Acid
  SITE 10: note = 3-(4-Pyridyl)-L-alanine
  SITE 13: note = alpha-methyl-leucine
  SITE 17: note = Lysine is chemically modified through conjugation of the epsilon-amino group of the Lysine side chain with (2-[2-(2-Amino-ethoxy)-ethoxy]-acetyl)-(gamma-Glu)-CO-(CH2) 16-CO2H
  SITE 20: note = 3-(4-Pyridyl)-L-alanine
  SITE 25: note = alpha-methyl-L-tyrosine
  SITE 41: note = Amidated residue

SEQ ID NO: 850 - protein, 41 aa, synthetic construct; identical to SEQ ID NO: 844
  SITE 2: note = 2-Aminoisobutyric Acid
  SITE 10: note = 3-(4-Pyridyl)-L-alanine
  SITE 13: note = alpha-methyl-leucine
  SITE 17: note = Lysine is chemically modified through conjugation of the epsilon-amino group of the Lysine side chain with (2-[2-(2-Amino-ethoxy)-ethoxy]-acetyl)-(gamma-Glu)-CO-(CH2) 16-CO2H
  SITE 20: note = 3-(4-Pyridyl)-L-alanine
  SITE 25: note = alpha-methyl-L-tyrosine
  SITE 41: note = Amidated residue

SEQ ID NO: 851 - protein, 41 aa, synthetic construct; identical to SEQ ID NO: 845
  SITE 2: note = 2-Aminoisobutyric Acid
  SITE 12: note = L-ornithine
  SITE 13: note = alpha-methyl-leucine
  SITE 17: note = Lysine is chemically modified through conjugation of the epsilon-amino group of the Lysine side chain with (2-[2-(2-Amino-ethoxy)-ethoxy]-acetyl)-(gamma-Glu)-CO-(CH2) 16-CO2H
  SITE 20: note = 3-(4-Pyridyl)-L-alanine
  SITE 25: note = alpha-methyl-L-tyrosine
  SITE 41: note = Amidated residue

SEQ ID NO: 852 - protein, 41 aa, synthetic construct; identical to SEQ ID NO: 846
  SITE 2: note = 2-Aminoisobutyric Acid
  SITE 13: note = alpha-methyl-leucine
  SITE 17: note = Lysine is chemically modified through conjugation of the epsilon-amino group of the Lysine side chain with (2-[2-(2-Amino-ethoxy)-ethoxy]-acetyl)-(gamma-Glu)-CO-(CH2) 16-CO2H
  SITE 20: note = 3-(4-Pyridyl)-L-alanine
  SITE 25: note = alpha-methyl-L-tyrosine
  SITE 41: note = Amidated residue

SEQ ID NO: 853 - protein, 41 aa, synthetic construct; identical to SEQ ID NO: 847
  SITE 2: note = 2-Aminoisobutyric Acid
  SITE 13: note = alpha-methyl-leucine
  SITE 17: note = Lysine is chemically modified through conjugation of the epsilon-amino group of the Lysine side chain with (2-[2-(2-Amino-ethoxy)-ethoxy]-acetyl)-(gamma-Glu)-CO-(CH2) 16-CO2H
  SITE 20: note = 3-(4-Pyridyl)-L-alanine
  SITE 25: note = alpha-methyl-L-tyrosine
  SITE 41: note = Amidated residue

SEQ ID NO: 854 - protein, 41 aa, synthetic construct
  SITE 2: note = 2-Aminoisobutyric Acid
  SITE 10: note = 3-(4-Pyridyl)-L-alanine
  SITE 13: note = alpha-methyl-leucine
  SITE 17: note = Lysine is chemically modified through conjugation of the epsilon-amino group of the Lysine side chain with (2-[2-(2-Amino-ethoxy)-ethoxy]-acetyl)-(gamma-Glu)-CO-(CH2) 16-CO2H
  SITE 20: note = 3-(4-Pyridyl)-L-alanine
  SITE 29: note = 2-Aminoisobutyric Acid
  SITE 41: note = Amidated residue
YXQGTFTSDXSQXLDKKAQXAFIEYLIEXGPSSGAPPPSSS

SEQ ID NO: 855 - protein, 41 aa, synthetic construct
  SITE 2: note = 2-Aminoisobutyric Acid
  SITE 10: note = 3-(4-Pyridyl)-L-alanine
  SITE 13: note = alpha-methyl-leucine
  SITE 16: note = L-ornithine
  SITE 17: note = Lysine is chemically modified through conjugation of the epsilon-amino group of the Lysine side chain with (2-[2-(2-Amino-ethoxy)-ethoxy]-acetyl)-(gamma-Glu)-CO-(CH2) 16-CO2H
  SITE 20: note = 3-(4-Pyridyl)-L-alanine
  SITE 25: note = alpha-methyl-L-tyrosine
  SITE 41: note = Amidated residue
YXQGTFTSDXSQXLDXKAQXAFIEXLIEGGPSSGAPPPSGS

SEQ ID NO: 856 - protein, 41 aa, synthetic construct; identical to SEQ ID NO: 855
  SITE 2: note = 2-Aminoisobutyric Acid
  SITE 10: note = 3-(4-Pyridyl)-L-alanine
  SITE 13: note = alpha-methyl-leucine
  SITE 16: note = L-ornithine
  SITE 17: note = Lysine is chemically modified through conjugation of the epsilon-amino group of the Lysine side chain with (2-[2-(2-Amino-ethoxy)-ethoxy]-acetyl)-(gamma-Glu)-CO-(CH2) 16-CO2H
  SITE 20: note = 2-Aminoisobutyric Acid
  SITE 25: note = alpha-methyl-L-tyrosine
  SITE 41: note = Amidated residue

SEQ ID NO: 857 - protein, 41 aa, synthetic construct
  SITE 2: note = 2-Aminoisobutyric Acid
  SITE 10: note = 3-(4-Pyridyl)-L-alanine
  SITE 13: note = alpha-methyl-leucine
  SITE 17: note = Lysine is chemically modified through conjugation of the epsilon-amino group of the Lysine side chain with (2-[2-(2-Amino-ethoxy)-ethoxy]-acetyl)-(gamma-Glu)-CO-(CH2) 16-CO2H
  SITE 20: note = 3-(4-Pyridyl)-L-alanine
  SITE 29: note = 2-Aminoisobutyric Acid
  SITE 41: note = Amidated residue
YXQGTFTSDXSQXLDKKAQXAFIEYLIEXGPSSGAPPPEGS

SEQ ID NO: 858 - protein, 41 aa, synthetic construct
  SITE 2: note = 2-Aminoisobutyric Acid
  SITE 10: note = 3-(4-Pyridyl)-L-alanine
  SITE 13: note = alpha-methyl-leucine
  SITE 17: note = Lysine is chemically modified through conjugation of the epsilon-amino group of the Lysine side chain with (2-[2-(2-Amino-ethoxy)-ethoxy]-acetyl)-(gamma-Glu)-CO-(CH2) 16-CO2H
  SITE 20: note = 3-(4-Pyridyl)-L-alanine
  SITE 25: note = alpha-methyl-L-tyrosine
  SITE 41: note = Amidated residue
YXQGTFTSDXSQXLDKKAQXAFIEXLIEGGPSSGAPPPEGS

SEQ ID NO: 859 - protein, 41 aa, synthetic construct; identical to SEQ ID NO: 858
  SITE 2: note = 2-Aminoisobutyric Acid
  SITE 10: note = 3-(4-Pyridyl)-L-alanine
  SITE 13: note = alpha-methyl-leucine
  SITE 17: note = Lysine is chemically modified through conjugation of the epsilon-amino group of the Lysine side chain with (2-[2-(2-Amino-ethoxy)-ethoxy]-acetyl)-(gamma-Glu)-CO-(CH2) 16-CO2H
  SITE 20: note = 2-Aminoisobutyric Acid
  SITE 25: note = alpha-methyl-L-tyrosine
  SITE 41: note = Amidated residue

SEQ ID NO: 860 - protein, 41 aa, synthetic construct
  SITE 2: note = 2-Aminoisobutyric Acid
  SITE 10: note = 3-(4-Pyridyl)-L-alanine
  SITE 13: note = alpha-methyl-leucine
  SITE 17: note = Lysine is chemically modified through conjugation of the epsilon-amino group of the Lysine side chain with (2-[2-(2-Amino-ethoxy)-ethoxy]-acetyl)-(gamma-Glu)-CO-(CH2) 16-CO2H
  SITE 20: note = 3-(4-Pyridyl)-L-alanine
  SITE 29: note = 2-Aminoisobutyric Acid
  SITE 41: note = Amidated residue
YXQGTFTSDXSQXLDKKAQXQFIEYLIEXGPSSGAPPPSGS

SEQ ID NO: 861 - protein, 41 aa, synthetic construct
  SITE 2: note = 2-Aminoisobutyric Acid
  SITE 10: note = 3-(4-Pyridyl)-L-alanine
  SITE 13: note = alpha-methyl-leucine
  SITE 17: note = Lysine is chemically modified through conjugation of the epsilon-amino group of the Lysine side chain with (2-[2-(2-Amino-ethoxy)-ethoxy]-acetyl)-(gamma-Glu)-CO-(CH2) 16-CO2H
  SITE 20: note = 3-(4-Pyridyl)-L-alanine
  SITE 25: note = alpha-methyl-L-tyrosine
  SITE 41: note = Amidated residue
YXQGTFTSDXSQXLDKKAQXQFIEXLIEGGPSSGAPPPSGS

SEQ ID NO: 862 - protein, 41 aa, synthetic construct
  SITE 2: note = 2-Aminoisobutyric Acid
  SITE 10: note = 3-(4-Pyridyl)-L-alanine
  SITE 13: note = alpha-methyl-leucine
  SITE 16: note = L-ornithine
  SITE 17: note = Lysine is chemically modified through conjugation of the epsilon-amino group of the Lysine side chain with (2-[2-(2-Amino-ethoxy)-ethoxy]-acetyl)-(gamma-Glu)-CO-(CH2) 16-CO2H
  SITE 20: note = 3-(4-Pyridyl)-L-alanine
  SITE 29: note = 2-Aminoisobutyric Acid
  SITE 41: note = Amidated residue
YXQGTFTSDXSQXLDXKAQXQFIEYLIEXGPSSGAPPPSGS

SEQ ID NO: 863 - protein, 41 aa, synthetic construct
  SITE 2: note = 2-Aminoisobutyric Acid
  SITE 10: note = 3-(4-Pyridyl)-L-alanine
  SITE 13: note = alpha-methyl-leucine
  SITE 16: note = L-ornithine
  SITE 17: note = Lysine is chemically modified through conjugation of the epsilon-amino group of the Lysine side chain with (2-[2-(2-Amino-ethoxy)-ethoxy]-acetyl)-(gamma-Glu)-CO-(CH2) 16-CO2H
  SITE 20: note = 3-(4-Pyridyl)-L-alanine
  SITE 25: note = alpha-methyl-L-tyrosine
  SITE 41: note = Amidated residue
YXQGTFTSDXSQXLDXKAQXQFIEXLIEGGPSSGAPPPSGS

SEQ ID NO: 864 - protein, 41 aa, synthetic construct; identical to SEQ ID NO: 816
  SITE 2: note = 2-Aminoisobutyric Acid
  SITE 10: note = 3-(4-Pyridyl)-L-alanine
  SITE 13: note = alpha-methyl-leucine
  SITE 17: note = Lysine is chemically modified through conjugation of the epsilon-amino group of the Lysine side chain with (gamma-Glu)2-CO-(CH2)16-CO2H
  SITE 20: note = 3-(4-Pyridyl)-L-alanine
  SITE 29: note = 2-Aminoisobutyric Acid
  SITE 41: note = Amidated residue

SEQ ID NO: 865 - protein, 41 aa, synthetic construct; identical to SEQ ID NO: 816
  SITE 2: note = 2-Aminoisobutyric Acid
  SITE 10: note = 3-(4-Pyridyl)-L-alanine
  SITE 13: note = alpha-methyl-leucine
  SITE 17: note = Lysine is chemically modified through conjugation of the epsilon-amino group of the Lysine side chain with (gamma-Glu)3-CO-(CH2)16-CO2H
  SITE 20: note = 3-(4-Pyridyl)-L-alanine
  SITE 29: note = 2-Aminoisobutyric Acid
  SITE 41: note = Amidated residue

SEQ ID NO: 866 - protein, 41 aa, synthetic construct; identical to SEQ ID NO: 816
  SITE 2: note = 2-Aminoisobutyric Acid
  SITE 10: note = 3-(4-Pyridyl)-L-alanine
  SITE 13: note = alpha-methyl-leucine
  SITE 17: note = Lysine is chemically modified through conjugation of the epsilon-amino group of the Lysine side chain with (2-[2-(2-Amino-ethoxy)-ethoxy]-acetyl)-(gamma-Glu)2-CO-(CH2 )16-CO2H
  SITE 20: note = 3-(4-Pyridyl)-L-alanine
  SITE 29: note = 2-Aminoisobutyric Acid
  SITE 41: note = Amidated residue

SEQ ID NO: 867 - protein, 41 aa, synthetic construct; identical to SEQ ID NO: 816
  SITE 2: note = 2-Aminoisobutyric Acid
  SITE 10: note = 3-(4-Pyridyl)-L-alanine
  SITE 13: note = alpha-methyl-leucine
  SITE 17: note = Lysine is chemically modified through conjugation of the epsilon-amino group of the Lysine side chain with (gamma-Glu)-(2-[2-(2-Amino-ethoxy)-ethoxy]-acetyl)-(gamma-G lu)-CO-(CH2)16-CO2H
  SITE 20: note = 3-(4-Pyridyl)-L-alanine
  SITE 29: note = 2-Aminoisobutyric Acid
  SITE 41: note = Amidated residue

SEQ ID NO: 868 - protein, 41 aa, synthetic construct; identical to SEQ ID NO: 819
  SITE 2: note = 2-Aminoisobutyric Acid
  SITE 13: note = alpha-methyl-leucine
  SITE 17: note = Lysine is chemically modified through conjugation of the epsilon-amino group of the Lysine side chain with (gamma-Glu)3-CO-(CH2)16-CO2H
  SITE 20: note = 3-(4-Pyridyl)-L-alanine
  SITE 29: note = 2-Aminoisobutyric Acid
  SITE 41: note = Amidated residue

SEQ ID NO: 869 - protein, 41 aa, synthetic construct; identical to SEQ ID NO: 819
  SITE 2: note = 2-Aminoisobutyric Acid
  SITE 13: note = alpha-methyl-leucine
  SITE 17: note = Lysine is chemically modified through conjugation of the epsilon-amino group of the Lysine side chain with (2-[2-(2-Amino-ethoxy)-ethoxy]-acetyl)-(gamma-Glu)2-CO-(CH2 )16-CO2H
  SITE 20: note = 3-(4-Pyridyl)-L-alanine
  SITE 29: note = 2-Aminoisobutyric Acid
  SITE 41: note = Amidated residue

SEQ ID NO: 870 - protein, 41 aa, synthetic construct; identical to SEQ ID NO: 819
  SITE 2: note = 2-Aminoisobutyric Acid
  SITE 13: note = alpha-methyl-leucine
  SITE 17: note = Lysine is chemically modified through conjugation of the epsilon-amino group of the Lysine side chain with (gamma-Glu)-(2-[2-(2-Amino-ethoxy)-ethoxy]-acetyl)-(gamma-G lu)-CO-(CH2)16-CO2H
  SITE 20: note = 3-(4-Pyridyl)-L-alanine
  SITE 29: note = 2-Aminoisobutyric Acid
  SITE 41: note = Amidated residue

SEQ ID NO: 871 - protein, 41 aa, synthetic construct; identical to SEQ ID NO: 809
  SITE 2: note = 2-Aminoisobutyric Acid
  SITE 10: note = 3-(4-Pyridyl)-L-alanine
  SITE 12: note = L-ornithine
  SITE 13: note = alpha-methyl-leucine
  SITE 17: note = Lysine is chemically modified through conjugation of the epsilon-amino group of the Lysine side chain with (gamma-Glu)2-CO-(CH2)16-CO2H
  SITE 20: note = 3-(4-Pyridyl)-L-alanine
  SITE 29: note = 2-Aminoisobutyric Acid
  SITE 41: note = Amidated residue

SEQ ID NO: 872 - protein, 41 aa, synthetic construct; identical to SEQ ID NO: 809
  SITE 2: note = 2-Aminoisobutyric Acid
  SITE 10: note = 3-(4-Pyridyl)-L-alanine
  SITE 12: note = L-ornithine
  SITE 13: note = alpha-methyl-leucine
  SITE 17: note = Lysine is chemically modified through conjugation of the epsilon-amino group of the Lysine side chain with (gamma-Glu)3-CO-(CH2)16-CO2H
  SITE 20: note = 3-(4-Pyridyl)-L-alanine
  SITE 29: note = 2-Aminoisobutyric Acid
  SITE 41: note = Amidated residue

SEQ ID NO: 873 - protein, 41 aa, synthetic construct; identical to SEQ ID NO: 809
  SITE 2: note = 2-Aminoisobutyric Acid
  SITE 10: note = 3-(4-Pyridyl)-L-alanine
  SITE 12: note = L-ornithine
  SITE 13: note = alpha-methyl-leucine
  SITE 17: note = Lysine is chemically modified through conjugation of the epsilon-amino group of the Lysine side chain with (2-[2-(2-Amino-ethoxy)-ethoxy]-acetyl)-(gamma-Glu)2-CO-(CH2 )16-CO2H
  SITE 20: note = 3-(4-Pyridyl)-L-alanine
  SITE 29: note = 2-Aminoisobutyric Acid
  SITE 41: note = Amidated residue

SEQ ID NO: 874 - protein, 41 aa, synthetic construct; identical to SEQ ID NO: 809
  SITE 2: note = 2-Aminoisobutyric Acid
  SITE 10: note = 3-(4-Pyridyl)-L-alanine
  SITE 12: note = L-ornithine
  SITE 13: note = alpha-methyl-leucine
  SITE 17: note = Lysine is chemically modified through conjugation of the epsilon-amino group of the Lysine side chain with (gamma-Glu)-(2-[2-(2-Amino-ethoxy)-ethoxy]-acetyl)-(gamma-G lu)-CO-(CH2)16-CO2H
  SITE 20: note = 3-(4-Pyridyl)-L-alanine
  SITE 29: note = 2-Aminoisobutyric Acid
  SITE 41: note = Amidated residue

SEQ ID NO: 875 - protein, 41 aa, synthetic construct; identical to SEQ ID NO: 833
  SITE 2: note = 2-Aminoisobutyric Acid
  SITE 10: note = 3-(4-Pyridyl)-L-alanine
  SITE 13: note = alpha-methyl-leucine
  SITE 17: note = Lysine is chemically modified through conjugation of the epsilon-amino group of the Lysine side chain with (2-[2-(2-Amino-ethoxy)-ethoxy]-acetyl)-(gamma-Glu)2-CO-(CH2 )16-CO2H
  SITE 20: note = 3-(4-Pyridyl)-L-alanine
  SITE 41: note = Amidated residue

SEQ ID NO: 876 - protein, 41 aa, synthetic construct; identical to SEQ ID NO: 833
  SITE 2: note = 2-Aminoisobutyric Acid
  SITE 10: note = 3-(4-Pyridyl)-L-alanine
  SITE 13: note = alpha-methyl-leucine
  SITE 17: note = Lysine is chemically modified through conjugation of the epsilon-amino group of the Lysine side chain with (gamma-Glu)2-CO-(CH2)16-CO2H
  SITE 20: note = 3-(4-Pyridyl)-L-alanine
  SITE 41: note = Amidated residue

SEQ ID NO: 877 - protein, 41 aa, synthetic construct; identical to SEQ ID NO: 836
  SITE 2: note = 2-Aminoisobutyric Acid
  SITE 10: note = 3-(4-Pyridyl)-L-alanine
  SITE 13: note = alpha-methyl-leucine
  SITE 17: note = Lysine is chemically modified through conjugation of the epsilon-amino group of the Lysine side chain with (2-[2-(2-Amino-ethoxy)-ethoxy]-acetyl)-(gamma-Glu)2-CO-(CH2 )16-CO2H
  SITE 20: note = 3-(4-Pyridyl)-L-alanine
  SITE 41: note = Amidated residue

SEQ ID NO: 878 - protein, 41 aa, synthetic construct; identical to SEQ ID NO: 836
  SITE 2: note = 2-Aminoisobutyric Acid
  SITE 10: note = 3-(4-Pyridyl)-L-alanine
  SITE 13: note = alpha-methyl-leucine
  SITE 17: note = Lysine is chemically modified through conjugation of the epsilon-amino group of the Lysine side chain with (gamma-Glu)2-CO-(CH2)16-CO2H
  SITE 20: note = 3-(4-Pyridyl)-L-alanine
  SITE 41: note = Amidated residue

SEQ ID NO: 879 - protein, 41 aa, synthetic construct
  SITE 2: note = 2-Aminoisobutyric Acid
  SITE 13: note = alpha-methyl-leucine
  SITE 17: note = Lysine is chemically modified through conjugation of the epsilon-amino group of the Lysine side chain with (2-[2-(2-Amino-ethoxy)-ethoxy]-acetyl)-(gamma-Glu)-CO-(CH2) 16-CO2H
  SITE 20: note = 3-(4-Pyridyl)-L-alanine
  SITE 41: note = Amidated residue
YXQGTFTSDFSQXLDKKAQXAFIEYLIEGGPSSGAPPPSGS

SEQ ID NO: 880 - protein, 41 aa, synthetic construct; identical to SEQ ID NO: 879
  SITE 2: note = 2-Aminoisobutyric Acid
  SITE 13: note = alpha-methyl-leucine
  SITE 17: note = Lysine is chemically modified through conjugation of the epsilon-amino group of the Lysine side chain with (gamma-Glu)2-CO-(CH2)16-CO2H
  SITE 20: note = 3-(4-Pyridyl)-L-alanine
  SITE 41: note = Amidated residue

SEQ ID NO: 881 - protein, 41 aa, synthetic construct
  SITE 2: note = 2-Aminoisobutyric Acid
  SITE 13: note = alpha-methyl-leucine
  SITE 17: note = Lysine is chemically modified through conjugation of the epsilon-amino group of the Lysine side chain with (2-[2-(2-Amino-ethoxy)-ethoxy]-acetyl)-(gamma-Glu)-CO-(CH2) 16-CO2H
  SITE 20: note = 3-(4-Pyridyl)-L-alanine
  SITE 41: note = Amidated residue
YXQGTFTSDFSQXLDKKAQXAFIEYLIAGGPSSGAPPPSGS

SEQ ID NO: 882 - protein, 41 aa, synthetic construct; identical to SEQ ID NO: 881
  SITE 2: note = 2-Aminoisobutyric Acid
  SITE 13: note = alpha-methyl-leucine
  SITE 17: note = Lysine is chemically modified through conjugation of the epsilon-amino group of the Lysine side chain with (gamma-Glu)2-CO-(CH2)16-CO2H
  SITE 20: note = 3-(4-Pyridyl)-L-alanine
  SITE 41: note = Amidated residue

SEQ ID NO: 883 - protein, 41 aa, synthetic construct
  SITE 2: note = 2-Aminoisobutyric Acid
  SITE 13: note = alpha-methyl-leucine
  SITE 17: note = Lysine is chemically modified through conjugation of the epsilon-amino group of the Lysine side chain with (2-[2-(2-Amino-ethoxy)-ethoxy]-acetyl)-(gamma-Glu)-CO-(CH2) 16-CO2H
  SITE 20: note = 3-(4-Pyridyl)-L-alanine
  SITE 41: note = Amidated residue
YXQGTFTSDFSQXLDKKAQXAFIEWLIEGGPSSGAPPPSGS

SEQ ID NO: 884 - protein, 41 aa, synthetic construct; identical to SEQ ID NO: 883
  SITE 2: note = 2-Aminoisobutyric Acid
  SITE 13: note = alpha-methyl-leucine
  SITE 17: note = Lysine is chemically modified through conjugation of the epsilon-amino group of the Lysine side chain with (2-[2-(2-Amino-ethoxy)-ethoxy]-acetyl)-(gamma-Glu)-CO-(CH2) 16-CO2H
  SITE 20: note = 3-(4-Pyridyl)-L-alanine
  SITE 41: note = Amidated residue

SEQ ID NO: 885 - protein, 41 aa, synthetic construct
  SITE 2: note = 2-Aminoisobutyric Acid
  SITE 12: note = L-ornithine
  SITE 13: note = alpha-methyl-leucine
  SITE 17: note = Lysine is chemically modified through conjugation of the epsilon-amino group of the Lysine side chain with (2-[2-(2-Amino-ethoxy)-ethoxy]-acetyl)-(gamma-Glu)-CO-(CH2) 16-CO2H
  SITE 20: note = 3-(4-Pyridyl)-L-alanine
  SITE 29: note = 2-Aminoisobutyric Acid
  SITE 41: note = Amidated residue
YXQGTFTSDFSXXLDKKAQXEFIEYLIEXGPSSGAPPPSGS

SEQ ID NO: 886 - protein, 41 aa, synthetic construct
  SITE 2: note = 2-Aminoisobutyric Acid
  SITE 12: note = L-ornithine
  SITE 13: note = alpha-methyl-leucine
  SITE 17: note = Lysine is chemically modified through conjugation of the epsilon-amino group of the Lysine side chain with (2-[2-(2-Amino-ethoxy)-ethoxy]-acetyl)-(gamma-Glu)-CO-(CH2) 16-CO2H
  SITE 20: note = 3-(4-Pyridyl)-L-alanine
  SITE 29: note = 2-Aminoisobutyric Acid
  SITE 41: note = Amidated residue
YXQGTFTSDFSXXLDKKAQXDFIEYLIEXGPSSGAPPPSGS

SEQ ID NO: 887 - protein, 41 aa, synthetic construct
  SITE 2: note = 2-Aminoisobutyric Acid
  SITE 10: note = 3-(4-Pyridyl)-L-alanine
  SITE 13: note = alpha-methyl-leucine
  SITE 17: note = Lysine is chemically modified through conjugation of the epsilon-amino group of the Lysine side chain with (2-[2-(2-Amino-ethoxy)-ethoxy]-acetyl)-(gamma-Glu)-CO-(CH2) 16-CO2H
  SITE 20: note = 3-(4-Pyridyl)-L-alanine
  SITE 29: note = 2-Aminoisobutyric Acid
  SITE 41: note = Amidated residue
YXQGTFTSDXSQXLDKKAQXAFIEYLIEXGPSSGAPPPSGE

SEQ ID NO: 888 - protein, 41 aa, synthetic construct; identical to SEQ ID NO: 887
  SITE 2: note = 2-Aminoisobutyric Acid
  SITE 10: note = 3-(4-Pyridyl)-L-alanine
  SITE 13: note = alpha-methyl-leucine
  SITE 17: note = Lysine is chemically modified through conjugation of the epsilon-amino group of the Lysine side chain with (gamma-Glu)2-CO-(CH2)16-CO2H
  SITE 20: note = 3-(4-Pyridyl)-L-alanine
  SITE 29: note = 2-Aminoisobutyric Acid
  SITE 41: note = Amidated residue

SEQ ID NO: 889 - protein, 41 aa, synthetic construct
  SITE 2: note = 2-Aminoisobutyric Acid
  SITE 10: note = 3-(4-Pyridyl)-L-alanine
  SITE 13: note = alpha-methyl-leucine
  SITE 17: note = Lysine is chemically modified through conjugation of the epsilon-amino group of the Lysine side chain with (gamma-Glu)2-CO-(CH2)16-CO2H
  SITE 20: note = 3-(4-Pyridyl)-L-alanine
  SITE 41: note = Amidated residue
YXQGTFTSDXSQXLDKKAQXAFIEYLIAGGPSSGAPPPSGE

SEQ ID NO: 890 - protein, 41 aa, synthetic construct
  SITE 2: note = 2-Aminoisobutyric Acid
  SITE 10: note = 3-(4-Pyridyl)-L-alanine
  SITE 13: note = alpha-methyl-leucine
  SITE 17: note = Lysine is chemically modified through conjugation of the epsilon-amino group of the Lysine side chain with (gamma-Glu)2-CO-(CH2)16-CO2H
  SITE 20: note = 3-(4-Pyridyl)-L-alanine
  SITE 29: note = 2-Aminoisobutyric Acid
  SITE 41: note = Amidated residue
YXQGTFTSDXSQXLDKKAQXAFIEYLIEXGPSSGAPPPEGE

SEQ ID NO: 891 - protein, 41 aa, synthetic construct; identical to SEQ ID NO: 816
  SITE 2: note = 2-Aminoisobutyric Acid
  SITE 10: note = 3-(4-Pyridyl)-L-alanine
  SITE 13: note = alpha-methyl-leucine
  SITE 17: note = Lysine is chemically modified through conjugation of the epsilon-amino group of the Lysine side chain with (2-[2-(2-Amino-ethoxy)-ethoxy]-acetyl)-(gamma-Glu)-CO-(CH2) 16-CO2H
  SITE 20: note = 3-(4-Pyridyl)-L-alanine
  SITE 29: note = 2-Aminoisobutyric Acid

SEQ ID NO: 892 - protein, 42 aa, synthetic construct
  SITE 2: note = 2-Aminoisobutyric Acid
  SITE 10: note = 3-(4-Pyridyl)-L-alanine
  SITE 13: note = alpha-methyl-leucine
  SITE 17: note = Lysine is chemically modified through conjugation of the epsilon-amino group of the Lysine side chain with (2-[2-(2-Amino-ethoxy)-ethoxy]-acetyl)-(gamma-Glu)-CO-(CH2) 16-CO2H
  SITE 20: note = 3-(4-Pyridyl)-L-alanine
  SITE 29: note = 2-Aminoisobutyric Acid
  SITE 42: note = Amidated residue
YXQGTFTSDXSQXLDKKAQXAFIEYLIEXGPSSGAPPPSGSE

SEQ ID NO: 893 - protein, 42 aa, synthetic construct; identical to SEQ ID NO: 892
  SITE 2: note = 2-Aminoisobutyric Acid
  SITE 10: note = 3-(4-Pyridyl)-L-alanine
  SITE 13: note = alpha-methyl-leucine
  SITE 17: note = Lysine is chemically modified through conjugation of the epsilon-amino group of the Lysine side chain with (2-[2-(2-Amino-ethoxy)-ethoxy]-acetyl)-(gamma-Glu)-CO-(CH2) 16-CO2H
  SITE 20: note = 3-(4-Pyridyl)-L-alanine
  SITE 29: note = 2-Aminoisobutyric Acid

SEQ ID NO: 894 - protein, 43 aa, synthetic construct
  SITE 2: note = 2-Aminoisobutyric Acid
  SITE 10: note = 3-(4-Pyridyl)-L-alanine
  SITE 13: note = alpha-methyl-leucine
  SITE 17: note = Lysine is chemically modified through conjugation of the epsilon-amino group of the Lysine side chain with (2-[2-(2-Amino-ethoxy)-ethoxy]-acetyl)-(gamma-Glu)-CO-(CH2) 16-CO2H
  SITE 20: note = 3-(4-Pyridyl)-L-alanine
  SITE 29: note = 2-Aminoisobutyric Acid
  SITE 43: note = Amidated residue
YXQGTFTSDXSQXLDKKAQXAFIEYLIEXGPSSGAPPPSGSGE

SEQ ID NO: 895 - protein, 43 aa, synthetic construct; identical to SEQ ID NO: 894
  SITE 2: note = 2-Aminoisobutyric Acid
  SITE 10: note = 3-(4-Pyridyl)-L-alanine
  SITE 13: note = alpha-methyl-leucine
  SITE 17: note = Lysine is chemically modified through conjugation of the epsilon-amino group of the Lysine side chain with (2-[2-(2-Amino-ethoxy)-ethoxy]-acetyl)-(gamma-Glu)-CO-(CH2) 16-CO2H
  SITE 20: note = 3-(4-Pyridyl)-L-alanine
  SITE 29: note = 2-Aminoisobutyric Acid

SEQ ID NO: 896 - protein, 42 aa, synthetic construct; identical to SEQ ID NO: 892
  SITE 2: note = 2-Aminoisobutyric Acid
  SITE 10: note = 3-(4-Pyridyl)-L-alanine
  SITE 13: note = alpha-methyl-leucine
  SITE 17: note = Lysine is chemically modified through conjugation of the epsilon-amino group of the Lysine side chain with (gamma-Glu)2-CO-(CH2)16-CO2H
  SITE 20: note = 3-(4-Pyridyl)-L-alanine
  SITE 29: note = 2-Aminoisobutyric Acid
  SITE 42: note = Amidated residue

SEQ ID NO: 897 - protein, 43 aa, synthetic construct; identical to SEQ ID NO: 894
  SITE 2: note = 2-Aminoisobutyric Acid
  SITE 10: note = 3-(4-Pyridyl)-L-alanine
  SITE 13: note = alpha-methyl-leucine
  SITE 17: note = Lysine is chemically modified through conjugation of the epsilon-amino group of the Lysine side chain with (gamma-Glu)2-CO-(CH2)16-CO2H
  SITE 20: note = 3-(4-Pyridyl)-L-alanine
  SITE 29: note = 2-Aminoisobutyric Acid

SEQ ID NO: 898 - protein, 42 aa, synthetic construct; identical to SEQ ID NO: 892
  SITE 2: note = 2-Aminoisobutyric Acid
  SITE 10: note = 3-(4-Pyridyl)-L-alanine
  SITE 13: note = alpha-methyl-leucine
  SITE 17: note = Lysine is chemically modified through conjugation of the epsilon-amino group of the Lysine side chain with (gamma-Glu)2-CO-(CH2)16-CO2H
  SITE 20: note = 3-(4-Pyridyl)-L-alanine
  SITE 29: note = 2-Aminoisobutyric Acid

SEQ ID NO: 899 - protein, 43 aa, synthetic construct; identical to SEQ ID NO: 894
  SITE 2: note = 2-Aminoisobutyric Acid
  SITE 10: note = 3-(4-Pyridyl)-L-alanine
  SITE 13: note = alpha-methyl-leucine
  SITE 17: note = Lysine is chemically modified through conjugation of the epsilon-amino group of the Lysine side chain with (gamma-Glu)2-CO-(CH2)16-CO2H
  SITE 20: note = 3-(4-Pyridyl)-L-alanine
  SITE 29: note = 2-Aminoisobutyric Acid

SEQ ID NO: 900 - protein, 41 aa, synthetic construct; identical to SEQ ID NO: 816
  SITE 2: note = 2-Aminoisobutyric Acid
  SITE 10: note = 3-(4-Pyridyl)-L-alanine
  SITE 13: note = alpha-methyl-leucine
  SITE 17: note = Lysine is chemically modified through conjugation of the epsilon-amino group of the Lysine side chain with (Glu)-(gamma-Glu)-CO-(CH2)16-CO2H
  SITE 20: note = 3-(4-Pyridyl)-L-alanine
  SITE 29: note = 2-Aminoisobutyric Acid
  SITE 41: note = Amidated residue

SEQ ID NO: 901 - protein, 41 aa, synthetic construct; identical to SEQ ID NO: 816
  SITE 2: note = 2-Aminoisobutyric Acid
  SITE 10: note = 3-(4-Pyridyl)-L-alanine
  SITE 13: note = alpha-methyl-leucine
  SITE 17: note = Lysine is chemically modified through conjugation of the epsilon-amino group of the Lysine side chain with (Glu)2-(gamma-Glu)-CO-(CH2)16-CO2H
  SITE 20: note = 3-(4-Pyridyl)-L-alanine
  SITE 29: note = 2-Aminoisobutyric Acid
  SITE 41: note = Amidated residue

SEQ ID NO: 902 - protein, 41 aa, synthetic construct; identical to SEQ ID NO: 816
  SITE 2: note = 2-Aminoisobutyric Acid
  SITE 10: note = 3-(4-Pyridyl)-L-alanine
  SITE 13: note = alpha-methyl-leucine
  SITE 17: note = Lysine is chemically modified through conjugation of the epsilon-amino group of the Lysine side chain with (Glu)-(gamma-Glu)-(Glu)-CO-(CH2)16-CO2H
  SITE 20: note = 3-(4-Pyridyl)-L-alanine
  SITE 29: note = 2-Aminoisobutyric Acid
  SITE 41: note = Amidated residue

SEQ ID NO: 903 - protein, 43 aa, synthetic construct
  SITE 2: note = 2-Aminoisobutyric Acid
  SITE 10: note = 3-(4-Pyridyl)-L-alanine
  SITE 13: note = alpha-methyl-leucine
  SITE 17: note = Lysine is chemically modified through conjugation of the epsilon-amino group of the Lysine side chain with (2-[2-(2-Amino-ethoxy)-ethoxy]-acetyl)-(gamma-Glu)-CO-(CH2) 16-CO2H
  SITE 20: note = 3-(4-Pyridyl)-L-alanine
  SITE 29: note = 2-Aminoisobutyric Acid
  SITE 43: note = Amidated residue
YXQGTFTSDXSQXLDKKAQXAFIEYLIEXGPSSGAPPPSGSEE

SEQ ID NO: 904 - protein, 44 aa, synthetic construct
  SITE 2: note = 2-Aminoisobutyric Acid
  SITE 10: note = 3-(4-Pyridyl)-L-alanine
  SITE 13: note = alpha-methyl-leucine
  SITE 17: note = Lysine is chemically modified through conjugation of the epsilon-amino group of the Lysine side chain with (2-[2-(2-Amino-ethoxy)-ethoxy]-acetyl)-(gamma-Glu)-CO-(CH2) 16-CO2H
  SITE 20: note = 3-(4-Pyridyl)-L-alanine
  SITE 29: note = 2-Aminoisobutyric Acid
  SITE 44: note = Amidated residue
YXQGTFTSDXSQXLDKKAQXAFIEYLIEXGPSSGAPPPSGSEEE

SEQ ID NO: 905 - protein, 43 aa, synthetic construct; identical to SEQ ID NO: 903
  SITE 2: note = 2-Aminoisobutyric Acid
  SITE 10: note = 3-(4-Pyridyl)-L-alanine
  SITE 13: note = alpha-methyl-leucine
  SITE 17: note = Lysine is chemically modified through conjugation of the epsilon-amino group of the Lysine side chain with (gamma-Glu)2-CO-(CH2)16-CO2H
  SITE 20: note = 3-(4-Pyridyl)-L-alanine
  SITE 29: note = 2-Aminoisobutyric Acid
  SITE 43: note = Amidated residue

SEQ ID NO: 906 - protein, 44 aa, synthetic construct; identical to SEQ ID NO: 904
  SITE 2: note = 2-Aminoisobutyric Acid
  SITE 10: note = 3-(4-Pyridyl)-L-alanine
  SITE 13: note = alpha-methyl-leucine
  SITE 17: note = Lysine is chemically modified through conjugation of the epsilon-amino group of the Lysine side chain with (gamma-Glu)2-CO-(CH2)16-CO2H
  SITE 20: note = 3-(4-Pyridyl)-L-alanine
  SITE 29: note = 2-Aminoisobutyric Acid
  SITE 44: note = Amidated residue

SEQ ID NO: 907 - protein, 42 aa, synthetic construct
  SITE 2: note = 2-Aminoisobutyric Acid
  SITE 10: note = 3-(4-Pyridyl)-L-alanine
  SITE 13: note = alpha-methyl-leucine
  SITE 17: note = Lysine is chemically modified through conjugation of the epsilon-amino group of the Lysine side chain with (2-[2-(2-Amino-ethoxy)-ethoxy]-acetyl)-(gamma-Glu)-CO-(CH2) 16-CO2H
  SITE 20: note = 2-Aminoisobutyric Acid
  SITE 29: note = 2-Aminoisobutyric Acid
  SITE 42: note = Amidated residue
YXQGTFTSDXSKXLDKKAQXAFIEYLIEXGPSSGAPPPSGSE

SEQ ID NO: 908 - protein, 43 aa, synthetic construct
  SITE 2: note = 2-Aminoisobutyric Acid
  SITE 10: note = 3-(4-Pyridyl)-L-alanine
  SITE 13: note = alpha-methyl-leucine
  SITE 17: note = Lysine is chemically modified through conjugation of the epsilon-amino group of the Lysine side chain with (2-[2-(2-Amino-ethoxy)-ethoxy]-acetyl)-(gamma-Glu)-CO-(CH2) 16-CO2H
  SITE 20: note = 2-Aminoisobutyric Acid
  SITE 29: note = 2-Aminoisobutyric Acid
  SITE 43: note = Amidated residue
YXQGTFTSDXSKXLDKKAQXAFIEYLIEXGPSSGAPPPSGSEE

SEQ ID NO: 909 - protein, 44 aa, synthetic construct
  SITE 2: note = 2-Aminoisobutyric Acid
  SITE 10: note = 3-(4-Pyridyl)-L-alanine
  SITE 13: note = alpha-methyl-leucine
  SITE 17: note = Lysine is chemically modified through conjugation of the epsilon-amino group of the Lysine side chain with (2-[2-(2-Amino-ethoxy)-ethoxy]-acetyl)-(gamma-Glu)-CO-(CH2) 16-CO2H
  SITE 20: note = 2-Aminoisobutyric Acid
  SITE 29: note = 2-Aminoisobutyric Acid
  SITE 44: note = Amidated residue
YXQGTFTSDXSKXLDKKAQXAFIEYLIEXGPSSGAPPPSGSEEE

SEQ ID NO: 910 - protein, 42 aa, synthetic construct; identical to SEQ ID NO: 907
  SITE 2: note = 2-Aminoisobutyric Acid
  SITE 10: note = 3-(4-Pyridyl)-L-alanine
  SITE 13: note = alpha-methyl-leucine
  SITE 17: note = Lysine is chemically modified through conjugation of the epsilon-amino group of the Lysine side chain with (gamma-Glu)2-CO-(CH2)16-CO2H
  SITE 20: note = 2-Aminoisobutyric Acid
  SITE 29: note = 2-Aminoisobutyric Acid
  SITE 42: note = Amidated residue

SEQ ID NO: 911 - protein, 43 aa, synthetic construct; identical to SEQ ID NO: 908
  SITE 2: note = 2-Aminoisobutyric Acid
  SITE 10: note = 3-(4-Pyridyl)-L-alanine
  SITE 13: note = alpha-methyl-leucine
  SITE 17: note = Lysine is chemically modified through conjugation of the epsilon-amino group of the Lysine side chain with (gamma-Glu)2-CO-(CH2)16-CO2H
  SITE 20: note = 2-Aminoisobutyric Acid
  SITE 29: note = 2-Aminoisobutyric Acid
  SITE 43: note = Amidated residue

SEQ ID NO: 912 - protein, 44 aa, synthetic construct; identical to SEQ ID NO: 909
  SITE 2: note = 2-Aminoisobutyric Acid
  SITE 10: note = 3-(4-Pyridyl)-L-alanine
  SITE 13: note = alpha-methyl-leucine
  SITE 17: note = Lysine is chemically modified through conjugation of the epsilon-amino group of the Lysine side chain with (gamma-Glu)2-CO-(CH2)16-CO2H
  SITE 20: note = 2-Aminoisobutyric Acid
  SITE 29: note = 2-Aminoisobutyric Acid
  SITE 44: note = Amidated residue

SEQ ID NO: 913 - protein, 41 aa, synthetic construct; identical to SEQ ID NO: 807
  SITE 2: note = 2-Aminoisobutyric Acid
  SITE 10: note = 3-(4-Pyridyl)-L-alanine
  SITE 13: note = alpha-methyl-leucine
  SITE 17: note = Lysine is chemically modified through conjugation of the epsilon-amino group of the Lysine side chain with (gamma-Glu)2-CO-(CH2)16-CO2H
  SITE 20: note = 2-Aminoisobutyric Acid
  SITE 29: note = 2-Aminoisobutyric Acid
  SITE 41: note = Amidated residue

SEQ ID NO: 914 - protein, 41 aa, synthetic construct
  SITE 2: note = 2-Aminoisobutyric Acid
  SITE 10: note = 3-(4-Pyridyl)-L-alanine
  SITE 13: note = alpha-methyl-leucine
  SITE 17: note = Lysine is chemically modified through conjugation of the epsilon-amino group of the Lysine side chain with (2-[2-(2-Amino-ethoxy)-ethoxy]-acetyl)-(gamma-Glu)-CO-(CH2) 16-CO2H
  SITE 20: note = 2-Aminoisobutyric Acid
  SITE 41: note = Amidated residue
YXQGTFTSDXSKXLDKKAQXAFIEYLIEGGPSSGAPPPSGS

SEQ ID NO: 915 - protein, 41 aa, synthetic construct
  SITE 2: note = 2-Aminoisobutyric Acid
  SITE 10: note = 3-(4-Pyridyl)-L-alanine
  SITE 13: note = alpha-methyl-leucine
  SITE 17: note = Lysine is chemically modified through conjugation of the epsilon-amino group of the Lysine side chain with (2-[2-(2-Amino-ethoxy)-ethoxy]-acetyl)-(gamma-Glu)-CO-(CH2) 16-CO2H
  SITE 20: note = 2-Aminoisobutyric Acid
  SITE 25: note = alpha-methyl-L-tyrosine
  SITE 41: note = Amidated residue
YXQGTFTSDXSRXLDKKAQXAFIEXLLEGGPSSGAPPPSGS

SEQ ID NO: 916 - protein, 41 aa, synthetic construct
  SITE 2: note = 2-Aminoisobutyric Acid
  SITE 10: note = 3-(4-Pyridyl)-L-alanine
  SITE 13: note = alpha-methyl-leucine
  SITE 17: note = Lysine is chemically modified through conjugation of the epsilon-amino group of the Lysine side chain with (2-[2-(2-Amino-ethoxy)-ethoxy]-acetyl)-(gamma-Glu)-CO-(CH2) 16-CO2H
  SITE 20: note = 2-Aminoisobutyric Acid
  SITE 25: note = alpha-methyl-L-tyrosine
  SITE 41: note = Amidated residue
YXQGTFTSDXSQXLDKKAQXAFIEXLLEGGPSSGAPPPSGS

SEQ ID NO: 917 - protein, 41 aa, synthetic construct
  SITE 2: note = 2-Aminoisobutyric Acid
  SITE 10: note = 3-(4-Pyridyl)-L-alanine
  SITE 13: note = alpha-methyl-leucine
  SITE 16: note = L-ornithine
  SITE 17: note = Lysine is chemically modified through conjugation of the epsilon-amino group of the Lysine side chain with (2-[2-(2-Amino-ethoxy)-ethoxy]-acetyl)-(gamma-Glu)-CO-(CH2) 16-CO2H
  SITE 20: note = 2-Aminoisobutyric Acid
  SITE 25: note = alpha-methyl-L-tyrosine
  SITE 41: note = Amidated residue
YXQGTFTSDXSQXLDXKAQXAFIEXLLEGGPSSGAPPPSGS

SEQ ID NO: 918 - protein, 41 aa, synthetic construct
  SITE 2: note = 2-Aminoisobutyric Acid
  SITE 13: note = alpha-methyl-leucine
  SITE 17: note = Lysine is chemically modified through conjugation of the epsilon-amino group of the Lysine side chain with (2-[2-(2-Amino-ethoxy)-ethoxy]-acetyl)-(gamma-Glu)-CO-(CH2) 16-CO2H
  SITE 20: note = 2-Aminoisobutyric Acid
  SITE 25: note = 3-(4-Pyridyl)-L-alanine
  SITE 29: note = 2-Aminoisobutyric Acid
  SITE 41: note = Amidated residue
YXQGTFTSDFSKXLDKKAQXAFIEXLIEXGPSSGAPPPSGS

SEQ ID NO: 919 - protein, 41 aa, synthetic construct
  SITE 2: note = 2-Aminoisobutyric Acid
  SITE 13: note = alpha-methyl-leucine
  SITE 17: note = Lysine is chemically modified through conjugation of the epsilon-amino group of the Lysine side chain with (2-[2-(2-Amino-ethoxy)-ethoxy]-acetyl)-(gamma-Glu)-CO-(CH2) 16-CO2H
  SITE 20: note = 2-Aminoisobutyric Acid
  SITE 25: note = 3-(4-Pyridyl)-L-alanine
  SITE 29: note = 2-Aminoisobutyric Acid
  SITE 41: note = Amidated residue
YXQGTFTSDFSQXLDKKAQXAFIEXLIEXGPSSGAPPPSGS

SEQ ID NO: 920 - protein, 41 aa, synthetic construct
  SITE 2: note = 2-Aminoisobutyric Acid
  SITE 10: note = 3-(4-Pyridyl)-L-alanine
  SITE 13: note = alpha-methyl-leucine
  SITE 17: note = Lysine is chemically modified through conjugation of the epsilon-amino group of the Lysine side chain with (2-[2-(2-Amino-ethoxy)-ethoxy]-acetyl)-(gamma-Glu)-CO-(CH2) 16-CO2H
  SITE 20: note = 2-Aminoisobutyric Acid
  SITE 25: note = 3-(4-Pyridyl)-L-alanine
  SITE 29: note = 2-Aminoisobutyric Acid
  SITE 41: note = Amidated residue
YXQGTFTSDXSKXLDKKAQXAFIEXLIEXGPSSGAPPPSGS

SEQ ID NO: 921 - protein, 41 aa, synthetic construct; identical to SEQ ID NO: 807
  SITE 2: note = 2-Aminoisobutyric Acid
  SITE 10: note = 3-(4-Pyridyl)-L-alanine
  SITE 13: note = alpha-methyl-leucine
  SITE 17: note = Lysine is chemically modified through conjugation of the epsilon-amino group of the Lysine side chain with (2-[2-(2-Amino-ethoxy)-ethoxy]-acetyl)-(gamma-Glu)-CO-(CH2) 16-CO2H
  SITE 20: note = 3-(4-Pyridyl)-L-alanine
  SITE 29: note = 2-Aminoisobutyric Acid
  SITE 41: note = Amidated residue

SEQ ID NO: 922 - protein, 41 aa, synthetic construct; identical to SEQ ID NO: 920
  SITE 2: note = 2-Aminoisobutyric Acid
  SITE 10: note = 3-(4-Pyridyl)-L-alanine
  SITE 13: note = alpha-methyl-leucine
  SITE 17: note = Lysine is chemically modified through conjugation of the epsilon-amino group of the Lysine side chain with (2-[2-(2-Amino-ethoxy)-ethoxy]-acetyl)-(gamma-Glu)-CO-(CH2) 16-CO2H
  SITE 20: note = 3-(4-Pyridyl)-L-alanine
  SITE 25: note = 3-(4-Pyridyl)-L-alanine
  SITE 29: note = 2-Aminoisobutyric Acid
  SITE 41: note = Amidated residue

SEQ ID NO: 923 - protein, 41 aa, synthetic construct; identical to SEQ ID NO: 504
  SITE 2: note = 2-Aminoisobutyric Acid
  SITE 10: note = 3-(4-Pyridyl)-L-alanine
  SITE 13: note = alpha-methyl-leucine
  SITE 17: note = Lysine is chemically modified through conjugation of the epsilon-amino group of the Lysine side chain with (2-[2-(2-Amino-ethoxy)-ethoxy]-acetyl)-(gamma-Glu)-CO-(CH2) 16-CO2H
  SITE 20: note = 3-(4-Pyridyl)-L-alanine
  SITE 25: note = 3-(4-Pyridyl)-L-alanine
  SITE 29: note = 2-Aminoisobutyric Acid
  SITE 41: note = Amidated residue

SEQ ID NO: 924 - protein, 41 aa, synthetic construct
  SITE 2: note = 2-Aminoisobutyric Acid
  SITE 10: note = 3-(4-Pyridyl)-L-alanine
  SITE 13: note = alpha-methyl-leucine
  SITE 17: note = Lysine is chemically modified through conjugation of the epsilon-amino group of the Lysine side chain with (2-[2-(2-Amino-ethoxy)-ethoxy]-acetyl)-(gamma-Glu)-CO-(CH2) 16-CO2H
  SITE 20: note = 3-(4-Pyridyl)-L-alanine
  SITE 29: note = 2-Aminoisobutyric Acid
  SITE 40: note = D-amino acid
YXQGTFTSDXSQXLDKKAQXAFIEYLIEXGPSSGAPPPSEG

SEQ ID NO: 925 - protein, 41 aa, synthetic construct
  SITE 2: note = 2-Aminoisobutyric Acid
  SITE 10: note = 3-(4-Pyridyl)-L-alanine
  SITE 13: note = alpha-methyl-leucine
  SITE 17: note = Lysine is chemically modified through conjugation of the epsilon-amino group of the Lysine side chain with (2-[2-(2-Amino-ethoxy)-ethoxy]-acetyl)-(gamma-Glu)-CO-(CH2) 16-CO2H
  SITE 20: note = 3-(4-Pyridyl)-L-alanine
  SITE 29: note = 2-Aminoisobutyric Acid
  SITE 40: note = D-amino acid
YXQGTFTSDXSQXLDKKAQXAFIEYLIEXGPSSGAPPPSEE

SEQ ID NO: 926 - protein, 41 aa, synthetic construct; identical to SEQ ID NO: 816
  SITE 2: note = 2-Aminoisobutyric Acid
  SITE 10: note = 3-(4-Pyridyl)-L-alanine
  SITE 13: note = alpha-methyl-leucine
  SITE 17: note = Lysine is chemically modified through conjugation of the epsilon-amino group of the Lysine side chain with D-Glutamic acid-(gamma-Glu)-CO-(CH2)16-CO2H
  SITE 20: note = 3-(4-Pyridyl)-L-alanine
  SITE 29: note = 2-Aminoisobutyric Acid
  SITE 41: note = Amidated residue

SEQ ID NO: 927 - protein, 41 aa, synthetic construct; identical to SEQ ID NO: 816
  SITE 2: note = 2-Aminoisobutyric Acid
  SITE 10: note = 3-(4-Pyridyl)-L-alanine
  SITE 13: note = alpha-methyl-leucine
  SITE 17: note = Lysine is chemically modified through conjugation of the epsilon-amino group of the Lysine side chain with (D-Glutamic acid)2-(gamma-Glu)-CO-(CH2)16-CO2H
  SITE 20: note = 3-(4-Pyridyl)-L-alanine
  SITE 29: note = 2-Aminoisobutyric Acid
  SITE 41: note = Amidated residue

SEQ ID NO: 928 - protein, 41 aa, synthetic construct; identical to SEQ ID NO: 816
  SITE 2: note = 2-Aminoisobutyric Acid
  SITE 10: note = 3-(4-Pyridyl)-L-alanine
  SITE 13: note = alpha-methyl-leucine
  SITE 17: note = Lysine is chemically modified through conjugation of the epsilon-amino group of the Lysine side chain with (gamma-Glu)-(D-Glutamic acid)2-CO-(CH2)16-CO2H
  SITE 20: note = 3-(4-Pyridyl)-L-alanine
  SITE 29: note = 2-Aminoisobutyric Acid
  SITE 41: note = Amidated residue

SEQ ID NO: 929 - protein, 41 aa, synthetic construct; identical to SEQ ID NO: 816
  SITE 2: note = 2-Aminoisobutyric Acid
  SITE 10: note = 3-(4-Pyridyl)-L-alanine
  SITE 13: note = alpha-methyl-leucine
  SITE 17: note = Lysine is chemically modified through conjugation of the epsilon-amino group of the Lysine side chain with D-Glutamic acid-(gamma-Glu)-D-Glutamic acid-CO-(CH2)16-CO2H
  SITE 20: note = 3-(4-Pyridyl)-L-alanine
  SITE 29: note = 2-Aminoisobutyric Acid
  SITE 41: note = Amidated residue

SEQ ID NO: 930 - protein, 42 aa, synthetic construct; identical to SEQ ID NO: 892
  SITE 2: note = 2-Aminoisobutyric Acid
  SITE 10: note = 3-(4-Pyridyl)-L-alanine
  SITE 13: note = alpha-methyl-leucine
  SITE 17: note = Lysine is chemically modified through conjugation of the epsilon-amino group of the Lysine side chain with D-Glutamic acid-(gamma-Glu)-CO-(CH2)16-CO2H
  SITE 20: note = 3-(4-Pyridyl)-L-alanine
  SITE 29: note = 2-Aminoisobutyric Acid
  SITE 42: note = Amidated residue

SEQ ID NO: 931 - protein, 42 aa, synthetic construct; identical to SEQ ID NO: 892
  SITE 2: note = 2-Aminoisobutyric Acid
  SITE 10: note = 3-(4-Pyridyl)-L-alanine
  SITE 13: note = alpha-methyl-leucine
  SITE 17: note = Lysine is chemically modified through conjugation of the epsilon-amino group of the Lysine side chain with (D-Glutamic acid)2-(gamma-Glu)-CO-(CH2)16-CO2H
  SITE 20: note = 3-(4-Pyridyl)-L-alanine
  SITE 29: note = 2-Aminoisobutyric Acid
  SITE 42: note = Amidated residue

SEQ ID NO: 932 - protein, 42 aa, synthetic construct; identical to SEQ ID NO: 892
  SITE 2: note = 2-Aminoisobutyric Acid
  SITE 10: note = 3-(4-Pyridyl)-L-alanine
  SITE 13: note = alpha-methyl-leucine
  SITE 17: note = Lysine is chemically modified through conjugation of the epsilon-amino group of the Lysine side chain with (gamma-Glu)-(D-Glutamic acid)2-CO-(CH2)16-CO2H
  SITE 20: note = 3-(4-Pyridyl)-L-alanine
  SITE 29: note = 2-Aminoisobutyric Acid
  SITE 42: note = Amidated residue

SEQ ID NO: 933 - protein, 42 aa, synthetic construct; identical to SEQ ID NO: 892
  SITE 2: note = 2-Aminoisobutyric Acid
  SITE 10: note = 3-(4-Pyridyl)-L-alanine
  SITE 13: note = alpha-methyl-leucine
  SITE 17: note = Lysine is chemically modified through conjugation of the epsilon-amino group of the Lysine side chain with D-Glutamic acid-(gamma-Glu)-D-Glutamic acid-CO-(CH2)16-CO2H
  SITE 20: note = 3-(4-Pyridyl)-L-alanine
  SITE 29: note = 2-Aminoisobutyric Acid
  SITE 42: note = Amidated residue

SEQ ID NO: 934 - protein, 43 aa, synthetic construct; identical to SEQ ID NO: 903
  SITE 2: note = 2-Aminoisobutyric Acid
  SITE 10: note = 3-(4-Pyridyl)-L-alanine
  SITE 13: note = alpha-methyl-leucine
  SITE 17: note = Lysine is chemically modified through conjugation of the epsilon-amino group of the Lysine side chain with D-Glutamic acid-(gamma-Glu)-CO-(CH2)16-CO2H
  SITE 20: note = 3-(4-Pyridyl)-L-alanine
  SITE 29: note = 2-Aminoisobutyric Acid
  SITE 43: note = Amidated residue

SEQ ID NO: 935 - protein, 43 aa, synthetic construct; identical to SEQ ID NO: 903
  SITE 2: note = 2-Aminoisobutyric Acid
  SITE 10: note = 3-(4-Pyridyl)-L-alanine
  SITE 13: note = alpha-methyl-leucine
  SITE 17: note = Lysine is chemically modified through conjugation of the epsilon-amino group of the Lysine side chain with (D-Glutamic acid)2-(gamma-Glu)-CO-(CH2)16-CO2H
  SITE 20: note = 3-(4-Pyridyl)-L-alanine
  SITE 29: note = 2-Aminoisobutyric Acid
  SITE 43: note = Amidated residue

SEQ ID NO: 936 - protein, 43 aa, synthetic construct; identical to SEQ ID NO: 903
  SITE 2: note = 2-Aminoisobutyric Acid
  SITE 10: note = 3-(4-Pyridyl)-L-alanine
  SITE 13: note = alpha-methyl-leucine
  SITE 17: note = Lysine is chemically modified through conjugation of the epsilon-amino group of the Lysine side chain with (gamma-Glu)-(D-Glutamic acid)2-CO-(CH2)16-CO2H
  SITE 20: note = 3-(4-Pyridyl)-L-alanine
  SITE 29: note = 2-Aminoisobutyric Acid
  SITE 43: note = Amidated residue

SEQ ID NO: 937 - protein, 43 aa, synthetic construct; identical to SEQ ID NO: 903
  SITE 2: note = 2-Aminoisobutyric Acid
  SITE 10: note = 3-(4-Pyridyl)-L-alanine
  SITE 13: note = alpha-methyl-leucine
  SITE 17: note = Lysine is chemically modified through conjugation of the epsilon-amino group of the Lysine side chain with D-Glutamic acid-(gamma-Glu)-D-Glutamic acid-CO-(CH2)16-CO2H
  SITE 20: note = 3-(4-Pyridyl)-L-alanine
  SITE 29: note = 2-Aminoisobutyric Acid
  SITE 43: note = Amidated residue

SEQ ID NO: 938 - protein, 41 aa, synthetic construct; identical to SEQ ID NO: 917
  SITE 2: note = 2-Aminoisobutyric Acid
  SITE 10: note = 3-(4-Pyridyl)-L-alanine
  SITE 13: note = alpha-methyl-leucine
  SITE 16: note = L-ornithine
  SITE 17: note = Lysine is chemically modified through conjugation of the epsilon-amino group of the Lysine side chain with (2-[2-(2-Amino-ethoxy)-ethoxy]-acetyl)-(gamma-Glu)-CO-(CH2) 16-CO2H
  SITE 20: note = 3-(4-Pyridyl)-L-alanine
  SITE 25: note = alpha-methyl-L-tyrosine
  SITE 41: note = Amidated residue

SEQ ID NO: 939 - protein, 41 aa, synthetic construct
  SITE 2: note = 2-Aminoisobutyric Acid
  SITE 10: note = 3-(4-Pyridyl)-L-alanine
  SITE 12: note = L-ornithine
  SITE 13: note = alpha-methyl-leucine
  SITE 16: note = L-ornithine
  SITE 17: note = Lysine is chemically modified through conjugation of the epsilon-amino group of the Lysine side chain with (2-[2-(2-Amino-ethoxy)-ethoxy]-acetyl)-(gamma-Glu)-CO-(CH2) 16-CO2H
  SITE 20: note = 2-Aminoisobutyric Acid
  SITE 25: note = alpha-methyl-L-tyrosine
  SITE 41: note = Amidated residue
YXQGTFTSDXSXXLDXKAQXAFIEXLLEGGPSSGAPPPSGS

SEQ ID NO: 940 - protein, 41 aa, synthetic construct; identical to SEQ ID NO: 861
  SITE 2: note = 2-Aminoisobutyric Acid
  SITE 10: note = 3-(4-Pyridyl)-L-alanine
  SITE 13: note = alpha-methyl-leucine
  SITE 17: note = Lysine is chemically modified through conjugation of the epsilon-amino group of the Lysine side chain with (gamma-Glu)2-CO-(CH2)16-CO2H
  SITE 20: note = 3-(4-Pyridyl)-L-alanine
  SITE 25: note = alpha-methyl-L-tyrosine
  SITE 41: note = Amidated residue

SEQ ID NO: 941 - protein, 41 aa, synthetic construct; identical to SEQ ID NO: 839
  SITE 2: note = 2-Aminoisobutyric Acid
  SITE 10: note = 3-(4-Pyridyl)-L-alanine
  SITE 13: note = alpha-methyl-leucine
  SITE 16: note = L-ornithine
  SITE 17: note = Lysine is chemically modified through conjugation of the epsilon-amino group of the Lysine side chain with (gamma-Glu)2-CO-(CH2)16-CO2H
  SITE 20: note = 3-(4-Pyridyl)-L-alanine
  SITE 29: note = 2-Aminoisobutyric Acid
  SITE 41: note = Amidated residue

SEQ ID NO: 942 - protein, 42 aa, synthetic construct
  SITE 2: note = 2-Aminoisobutyric Acid
  SITE 10: note = 3-(4-Pyridyl)-L-alanine
  SITE 13: note = alpha-methyl-leucine
  SITE 16: note = L-ornithine
  SITE 17: note = Lysine is chemically modified through conjugation of the epsilon-amino group of the Lysine side chain with (2-[2-(2-Amino-ethoxy)-ethoxy]-acetyl)-(gamma-Glu)2-CO-(CH2 )16-CO2H
  SITE 20: note = 3-(4-Pyridyl)-L-alanine
  SITE 29: note = 2-Aminoisobutyric Acid
  SITE 42: note = Amidated residue
YXQGTFTSDXSQXLDXKAQXAFIEYLIEXGPSSGAPPPSGSE

SEQ ID NO: 943 - protein, 43 aa, synthetic construct
  SITE 2: note = 2-Aminoisobutyric Acid
  SITE 10: note = 3-(4-Pyridyl)-L-alanine
  SITE 13: note = alpha-methyl-leucine
  SITE 16: note = L-ornithine
  SITE 17: note = Lysine is chemically modified through conjugation of the epsilon-amino group of the Lysine side chain with (gamma-Glu)2-CO-(CH2)16-CO2H
  SITE 20: note = 3-(4-Pyridyl)-L-alanine
  SITE 29: note = 2-Aminoisobutyric Acid
  SITE 43: note = Amidated residue
YXQGTFTSDXSQXLDXKAQXAFIEYLIEXGPSSGAPPPSGSEE

SEQ ID NO: 944 - protein, 41 aa, synthetic construct; identical to SEQ ID NO: 916
  SITE 2: note = 2-Aminoisobutyric Acid
  SITE 10: note = 3-(4-Pyridyl)-L-alanine
  SITE 13: note = alpha-methyl-leucine
  SITE 17: note = Lysine is chemically modified through conjugation of the epsilon-amino group of the Lysine side chain with (gamma-Glu)2-CO-(CH2)16-CO2H
  SITE 20: note = 2-Aminoisobutyric Acid
  SITE 25: note = alpha-methyl-L-tyrosine
  SITE 41: note = Amidated residue

SEQ ID NO: 945 - protein, 41 aa, synthetic construct
  SITE 2: note = 2-Aminoisobutyric Acid
  SITE 10: note = 3-(4-Pyridyl)-L-alanine
  SITE 12: note = L-ornithine
  SITE 13: note = alpha-methyl-leucine
  SITE 16: note = L-ornithine
  SITE 17: note = Lysine is chemically modified through conjugation of the epsilon-amino group of the Lysine side chain with (gamma-Glu)2-CO-(CH2)16-CO2H
  SITE 20: note = 3-(4-Pyridyl)-L-alanine
  SITE 29: note = 2-Aminoisobutyric Acid
  SITE 41: note = Amidated residue
YXQGTFTSDXSXXLDXKAQXAFIEYLIEXGPSSGAPPPSGS

SEQ ID NO: 946 - protein, 41 aa, synthetic construct
  SITE 2: note = 2-Aminoisobutyric Acid
  SITE 10: note = 3-(4-Pyridyl)-L-alanine
  SITE 12: note = L-ornithine
  SITE 13: note = alpha-methyl-leucine
  SITE 16: note = L-ornithine
  SITE 17: note = Lysine is chemically modified through conjugation of the epsilon-amino group of the Lysine side chain with (gamma-Glu)2-CO-(CH2)16-CO2H
  SITE 20: note = 3-(4-Pyridyl)-L-alanine
  SITE 29: note = 2-Aminoisobutyric Acid
  SITE 41: note = Amidated residue
YXQGTFTSDXSXXLDXKAQXQFIEYLIEXGPSSGAPPPSGS

SEQ ID NO: 947 - protein, 41 aa, synthetic construct; identical to SEQ ID NO: 503
  SITE 2: note = 2-Aminoisobutyric Acid
  SITE 10: note = 3-(4-Pyridyl)-L-alanine
  SITE 12: note = L-ornithine
  SITE 13: note = alpha-methyl-leucine
  SITE 17: note = Lysine is chemically modified through conjugation of the epsilon-amino group of the Lysine side chain with (gamma-Glu)2-CO-(CH2)16-CO2H
  SITE 20: note = 2-Aminoisobutyric Acid
  SITE 25: note = alpha-methyl-L-tyrosine
  SITE 41: note = Amidated residue

SEQ ID NO: 948 - protein, 41 aa, synthetic construct
  SITE 2: note = 2-Aminoisobutyric Acid
  SITE 10: note = 3-(4-Pyridyl)-L-alanine
  SITE 12: note = L-ornithine
  SITE 13: note = alpha-methyl-leucine
  SITE 17: note = Lysine is chemically modified through conjugation of the epsilon-amino group of the Lysine side chain with (gamma-Glu)2-CO-(CH2)16-CO2H
  SITE 20: note = 2-Aminoisobutyric Acid
  SITE 25: note = alpha-methyl-L-tyrosine
  SITE 41: note = Amidated residue
YXQGTFTSDXSXXLDKKAQXAFIEXLLEGGPSSGAPPPSGS

SEQ ID NO: 949 - protein, 42 aa, synthetic construct
  SITE 2: note = 2-Aminoisobutyric Acid
  SITE 10: note = 3-(4-Pyridyl)-L-alanine
  SITE 12: note = L-ornithine
  SITE 13: note = alpha-methyl-leucine
  SITE 16: note = L-ornithine
  SITE 17: note = Lysine is chemically modified through conjugation of the epsilon-amino group of the Lysine side chain with (gamma-Glu)3-CO-(CH2)16-CO2H
  SITE 20: note = 3-(4-Pyridyl)-L-alanine
  SITE 29: note = 2-Aminoisobutyric Acid
  SITE 42: note = Amidated residue
YXQGTFTSDXSXXLDXKAQXAFIEYLIEXGPSSGAPPPSGSE

SEQ ID NO: 950 - protein, 43 aa, synthetic construct
  SITE 2: note = 2-Aminoisobutyric Acid
  SITE 10: note = 3-(4-Pyridyl)-L-alanine
  SITE 12: note = L-ornithine
  SITE 13: note = alpha-methyl-leucine
  SITE 17: note = Lysine is chemically modified through conjugation of the epsilon-amino group of the Lysine side chain with (gamma-Glu)2-CO-(CH2)16-CO2H
  SITE 20: note = 2-Aminoisobutyric Acid
  SITE 25: note = alpha-methyl-L-tyrosine
  SITE 43: note = Amidated residue
YXQGTFTSDXSXXLDKKAQXAFIEXLLEGGPSSGAPPPSGSEE

SEQ ID NO: 951 - protein, 43 aa, synthetic construct
  SITE 2: note = 2-Aminoisobutyric Acid
  SITE 10: note = 3-(4-Pyridyl)-L-alanine
  SITE 13: note = alpha-methyl-leucine
  SITE 17: note = Lysine is chemically modified through conjugation of the epsilon-amino group of the Lysine side chain with (gamma-Glu)2-CO-(CH2)16-CO2H
  SITE 20: note = 2-Aminoisobutyric Acid
  SITE 25: note = alpha-methyl-L-tyrosine
  SITE 43: note = Amidated residue
YXQGTFTSDXSQXLDKKAQXAFIEXLLEGGPSSGAPPPSGSEE

SEQ ID NO: 952 - protein, 43 aa, synthetic construct
  SITE 2: note = 2-Aminoisobutyric Acid
  SITE 10: note = 3-(4-Pyridyl)-L-alanine
  SITE 13: note = alpha-methyl-leucine
  SITE 16: note = L-ornithine
  SITE 17: note = Lysine is chemically modified through conjugation of the epsilon-amino group of the Lysine side chain with (gamma-Glu)2-CO-(CH2)16-CO2H
  SITE 20: note = 2-Aminoisobutyric Acid
  SITE 25: note = alpha-methyl-L-tyrosine
  SITE 43: note = Amidated residue
YXQGTFTSDXSQXLDXKAQXAFIEXLLEGGPSSGAPPPSGSEE

SEQ ID NO: 953 - protein, 41 aa, synthetic construct; identical to SEQ ID NO: 834
  SITE 2: note = 2-Aminoisobutyric Acid
  SITE 10: note = 3-(4-Pyridyl)-L-alanine
  SITE 13: note = alpha-methyl-leucine
  SITE 17: note = Lysine is chemically modified through conjugation of the epsilon-amino group of the Lysine side chain with (2-[2-(2-Amino-ethoxy)-ethoxy]-acetyl)-(gamma-Glu)2-CO-(CH2 )16-CO2H
  SITE 20: note = 3-(4-Pyridyl)-L-alanine
  SITE 41: note = Amidated residue

SEQ ID NO: 954 - protein, 41 aa, synthetic construct; identical to SEQ ID NO: 844
  SITE 2: note = 2-Aminoisobutyric Acid
  SITE 10: note = 3-(4-Pyridyl)-L-alanine
  SITE 13: note = alpha-methyl-leucine
  SITE 17: note = Lysine is chemically modified through conjugation of the epsilon-amino group of the Lysine side chain with (2-[2-(2-Amino-ethoxy)-ethoxy]-acetyl)-(gamma-Glu)-CO-(CH2) 16-CO2H
  SITE 20: note = 3-(4-Pyridyl)-L-alanine
  SITE 25: note = 3-(4-Pyridyl)-L-alanine
  SITE 41: note = Amidated residue

SEQ ID NO: 955 - protein, 41 aa, synthetic construct; identical to SEQ ID NO: 503
  SITE 2: note = 2-Aminoisobutyric Acid
  SITE 10: note = 3-(4-Pyridyl)-L-alanine
  SITE 12: note = L-ornithine
  SITE 13: note = alpha-methyl-leucine
  SITE 17: note = Lysine is chemically modified through conjugation of the epsilon-amino group of the Lysine side chain with (2-[2-(2-Amino-ethoxy)-ethoxy]-acetyl)-(gamma-Glu)-CO-(CH2) 16-CO2H
  SITE 20: note = 3-(4-Pyridyl)-L-alanine
  SITE 25: note = 3-(4-Pyridyl)-L-alanine
  SITE 41: note = Amidated residue

SEQ ID NO: 956 - protein, 41 aa, synthetic construct; identical to SEQ ID NO: 843
  SITE 2: note = 2-Aminoisobutyric Acid
  SITE 10: note = 3-(4-Pyridyl)-L-alanine
  SITE 13: note = alpha-methyl-leucine
  SITE 17: note = Lysine is chemically modified through conjugation of the epsilon-amino group of the Lysine side chain with (2-[2-(2-Amino-ethoxy)-ethoxy]-acetyl)-(gamma-Glu)-CO-(CH2) 16-CO2H
  SITE 20: note = 3-(4-Pyridyl)-L-alanine
  SITE 25: note = 3-(4-Pyridyl)-L-alanine
  SITE 41: note = Amidated residue

SEQ ID NO: 957 - protein, 41 aa, synthetic construct; identical to SEQ ID NO: 844
  SITE 2: note = 2-Aminoisobutyric Acid
  SITE 10: note = 3-(4-Pyridyl)-L-alanine
  SITE 13: note = alpha-methyl-leucine
  SITE 17: note = Lysine is chemically modified through conjugation of the epsilon-amino group of the Lysine side chain with (gamma-Glu)2-CO-(CH2)16-CO2H
  SITE 20: note = 3-(4-Pyridyl)-L-alanine
  SITE 25: note = 3-(4-Pyridyl)-L-alanine
  SITE 41: note = Amidated residue

SEQ ID NO: 958 - protein, 41 aa, synthetic construct; identical to SEQ ID NO: 503
  SITE 2: note = 2-Aminoisobutyric Acid
  SITE 10: note = 3-(4-Pyridyl)-L-alanine
  SITE 12: note = L-ornithine
  SITE 13: note = alpha-methyl-leucine
  SITE 17: note = Lysine is chemically modified through conjugation of the epsilon-amino group of the Lysine side chain with (gamma-Glu)2-CO-(CH2)16-CO2H
  SITE 20: note = 3-(4-Pyridyl)-L-alanine
  SITE 25: note = 3-(4-Pyridyl)-L-alanine
  SITE 41: note = Amidated residue

SEQ ID NO: 959 - protein, 41 aa, synthetic construct; identical to SEQ ID NO: 843
  SITE 2: note = 2-Aminoisobutyric Acid
  SITE 10: note = 3-(4-Pyridyl)-L-alanine
  SITE 13: note = alpha-methyl-leucine
  SITE 17: note = Lysine is chemically modified through conjugation of the epsilon-amino group of the Lysine side chain with (gamma-Glu)2-CO-(CH2)16-CO2H
  SITE 20: note = 3-(4-Pyridyl)-L-alanine
  SITE 25: note = 3-(4-Pyridyl)-L-alanine
  SITE 41: note = Amidated residue

SEQ ID NO: 960 - protein, 43 aa, synthetic construct
  SITE 2: note = 2-Aminoisobutyric Acid
  SITE 10: note = 3-(4-Pyridyl)-L-alanine
  SITE 13: note = alpha-methyl-leucine
  SITE 17: note = Lysine is chemically modified through conjugation of the epsilon-amino group of the Lysine side chain with (2-[2-(2-Amino-ethoxy)-ethoxy]-acetyl)-(gamma-Glu)-CO-(CH2) 16-CO2H
  SITE 20: note = 3-(4-Pyridyl)-L-alanine
  SITE 25: note = 3-(4-Pyridyl)-L-alanine
  SITE 43: note = Amidated residue
YXQGTFTSDXSQXLDKKAQXAFIEXLIEGGPSSGAPPPSGSEE

SEQ ID NO: 961 - protein, 43 aa, synthetic construct
  SITE 2: note = 2-Aminoisobutyric Acid
  SITE 10: note = 3-(4-Pyridyl)-L-alanine
  SITE 12: note = L-ornithine
  SITE 13: note = alpha-methyl-leucine
  SITE 17: note = Lysine is chemically modified through conjugation of the epsilon-amino group of the Lysine side chain with (2-[2-(2-Amino-ethoxy)-ethoxy]-acetyl)-(gamma-Glu)-CO-(CH2) 16-CO2H
  SITE 20: note = 3-(4-Pyridyl)-L-alanine
  SITE 25: note = 3-(4-Pyridyl)-L-alanine
  SITE 43: note = Amidated residue
YXQGTFTSDXSXXLDKKAQXAFIEXLIEGGPSSGAPPPSGSEE

SEQ ID NO: 962 - protein, 43 aa, synthetic construct
  SITE 2: note = 2-Aminoisobutyric Acid
  SITE 10: note = 3-(4-Pyridyl)-L-alanine
  SITE 13: note = alpha-methyl-leucine
  SITE 17: note = Lysine is chemically modified through conjugation of the epsilon-amino group of the Lysine side chain with (2-[2-(2-Amino-ethoxy)-ethoxy]-acetyl)-(gamma-Glu)-CO-(CH2) 16-CO2H
  SITE 20: note = 3-(4-Pyridyl)-L-alanine
  SITE 25: note = 3-(4-Pyridyl)-L-alanine
  SITE 43: note = Amidated residue
YXQGTFTSDXSRXLDKKAQXAFIEXLIEGGPSSGAPPPSGSEE

SEQ ID NO: 963 - protein, 43 aa, synthetic construct; identical to SEQ ID NO: 960
  SITE 2: note = 2-Aminoisobutyric Acid
  SITE 10: note = 3-(4-Pyridyl)-L-alanine
  SITE 13: note = alpha-methyl-leucine
  SITE 17: note = Lysine is chemically modified through conjugation of the epsilon-amino group of the Lysine side chain with (gamma-Glu)2-CO-(CH2)16-CO2H
  SITE 20: note = 3-(4-Pyridyl)-L-alanine
  SITE 25: note = 3-(4-Pyridyl)-L-alanine
  SITE 43: note = Amidated residue

SEQ ID NO: 964 - protein, 43 aa, synthetic construct; identical to SEQ ID NO: 961
  SITE 2: note = 2-Aminoisobutyric Acid
  SITE 10: note = 3-(4-Pyridyl)-L-alanine
  SITE 12: note = L-ornithine
  SITE 13: note = alpha-methyl-leucine
  SITE 17: note = Lysine is chemically modified through conjugation of the epsilon-amino group of the Lysine side chain with (gamma-Glu)2-CO-(CH2)16-CO2H
  SITE 20: note = 3-(4-Pyridyl)-L-alanine
  SITE 25: note = 3-(4-Pyridyl)-L-alanine
  SITE 43: note = Amidated residue

SEQ ID NO: 965 - protein, 43 aa, synthetic construct; identical to SEQ ID NO: 962
  SITE 2: note = 2-Aminoisobutyric Acid
  SITE 10: note = 3-(4-Pyridyl)-L-alanine
  SITE 13: note = alpha-methyl-leucine
  SITE 17: note = Lysine is chemically modified through conjugation of the epsilon-amino group of the Lysine side chain with (gamma-Glu)2-CO-(CH2)16-CO2H
  SITE 20: note = 3-(4-Pyridyl)-L-alanine
  SITE 25: note = 3-(4-Pyridyl)-L-alanine
  SITE 43: note = Amidated residue

SEQ ID NO: 966 - protein, 43 aa, synthetic construct
  SITE 2: note = 2-Aminoisobutyric Acid
  SITE 10: note = 3-(4-Pyridyl)-L-alanine
  SITE 13: note = alpha-methyl-leucine
  SITE 17: note = Lysine is chemically modified through conjugation of the epsilon-amino group of the Lysine side chain with (gamma-Glu)2-CO-(CH2)16-CO2H
  SITE 20: note = 3-(4-Pyridyl)-L-alanine
  SITE 43: note = Amidated residue
YXQGTFTSDXSQXLDKKAQXAFIEYLIAGGPSSGAPPPSGSEE

SEQ ID NO: 967 - protein, 43 aa, synthetic construct
  SITE 2: note = 2-Aminoisobutyric Acid
  SITE 10: note = 3-(4-Pyridyl)-L-alanine
  SITE 12: note = L-ornithine
  SITE 13: note = alpha-methyl-leucine
  SITE 17: note = Lysine is chemically modified through conjugation of the epsilon-amino group of the Lysine side chain with (gamma-Glu)2-CO-(CH2)16-CO2H
  SITE 20: note = 3-(4-Pyridyl)-L-alanine
  SITE 43: note = Amidated residue
YXQGTFTSDXSXXLDKKAQXAFIEYLIAGGPSSGAPPPSGSEE

SEQ ID NO: 968 - protein, 43 aa, synthetic construct
  SITE 2: note = 2-Aminoisobutyric Acid
  SITE 10: note = 3-(4-Pyridyl)-L-alanine
  SITE 13: note = alpha-methyl-leucine
  SITE 17: note = Lysine is chemically modified through conjugation of the epsilon-amino group of the Lysine side chain with (gamma-Glu)2-CO-(CH2)16-CO2H
  SITE 20: note = 3-(4-Pyridyl)-L-alanine
  SITE 43: note = Amidated residue
YXQGTFTSDXSRXLDKKAQXAFIEYLIAGGPSSGAPPPSGSEE

SEQ ID NO: 969 - protein, 43 aa, synthetic construct
  SITE 2: note = 2-Aminoisobutyric Acid
  SITE 10: note = 3-(4-Pyridyl)-L-alanine
  SITE 13: note = alpha-methyl-leucine
  SITE 17: note = Lysine is chemically modified through conjugation of the epsilon-amino group of the Lysine side chain with (gamma-Glu)2-CO-(CH2)16-CO2H
  SITE 20: note = 3-(4-Pyridyl)-L-alanine
  SITE 43: note = Amidated residue
YXQGTFTSDXSQXLDKKAQXAFIEYLIAGGESSGAPPPSGSEE

SEQ ID NO: 970 - protein, 43 aa, synthetic construct
  SITE 2: note = 2-Aminoisobutyric Acid
  SITE 10: note = 3-(4-Pyridyl)-L-alanine
  SITE 12: note = L-ornithine
  SITE 13: note = alpha-methyl-leucine
  SITE 17: note = Lysine is chemically modified through conjugation of the epsilon-amino group of the Lysine side chain with (gamma-Glu)2-CO-(CH2)16-CO2H
  SITE 20: note = 3-(4-Pyridyl)-L-alanine
  SITE 43: note = Amidated residue
YXQGTFTSDXSXXLDKKAQXAFIEYLIAGGESSGAPPPSGSEE

SEQ ID NO: 971 - protein, 43 aa, synthetic construct
  SITE 2: note = 2-Aminoisobutyric Acid
  SITE 10: note = 3-(4-Pyridyl)-L-alanine
  SITE 13: note = alpha-methyl-leucine
  SITE 17: note = Lysine is chemically modified through conjugation of the epsilon-amino group of the Lysine side chain with (gamma-Glu)2-CO-(CH2)16-CO2H
  SITE 20: note = 3-(4-Pyridyl)-L-alanine
  SITE 43: note = Amidated residue
YXQGTFTSDXSRXLDKKAQXAFIEYLIAGGESSGAPPPSGSEE

SEQ ID NO: 972 - protein, 42 aa, synthetic construct
  SITE 2: note = 2-Aminoisobutyric Acid
  SITE 10: note = 3-(4-Pyridyl)-L-alanine
  SITE 12: note = L-ornithine
  SITE 13: note = alpha-methyl-leucine
  SITE 17: note = Lysine is chemically modified through conjugation of the epsilon-amino group of the Lysine side chain with (gamma-Glu)2-CO-(CH2)16-CO2H
  SITE 20: note = 3-(4-Pyridyl)-L-alanine
  SITE 25: note = alpha-methyl-L-tyrosine
  SITE 42: note = Amidated residue
YXQGTFTSDXSXXLDKKAQXAFIEXLIEGGPSSGAPPPSGSE

SEQ ID NO: 973 - protein, 43 aa, synthetic construct; identical to SEQ ID NO: 961
  SITE 2: note = 2-Aminoisobutyric Acid
  SITE 10: note = 3-(4-Pyridyl)-L-alanine
  SITE 12: note = L-ornithine
  SITE 13: note = alpha-methyl-leucine
  SITE 17: note = Lysine is chemically modified through conjugation of the epsilon-amino group of the Lysine side chain with (gamma-Glu)2-CO-(CH2)16-CO2H
  SITE 20: note = 3-(4-Pyridyl)-L-alanine
  SITE 25: note = alpha-methyl-L-tyrosine
  SITE 43: note = Amidated residue

SEQ ID NO: 974 - protein, 41 aa, synthetic construct; identical to SEQ ID NO: 834
  SITE 2: note = 2-Aminoisobutyric Acid
  SITE 10: note = 3-(4-Pyridyl)-L-alanine
  SITE 13: note = alpha-methyl-leucine
  SITE 17: note = Lysine is chemically modified through conjugation of the epsilon-amino group of the Lysine side chain with (gamma-Glu)2-CO-(CH2)16-CO2H
  SITE 20: note = 3-(4-Pyridyl)-L-alanine
  SITE 41: note = Amidated residue

SEQ ID NO: 975 - protein, 41 aa, synthetic construct
  SITE 2: note = 2-Aminoisobutyric Acid
  SITE 10: note = 3-(4-Pyridyl)-L-alanine
  SITE 13: note = alpha-methyl-leucine
  SITE 17: note = Lysine is chemically modified through conjugation of the epsilon-amino group of the Lysine side chain with (gamma-Glu)2-CO-(CH2)16-CO2H
  SITE 20: note = 3-(4-Pyridyl)-L-alanine
YXQGTFTSDXSQXLDKKAQXAFIEYLIAGGPSSGAPPPEGS

SEQ ID NO: 976 - protein, 41 aa, synthetic construct
  SITE 2: note = 2-Aminoisobutyric Acid
  SITE 10: note = 3-(4-Pyridyl)-L-alanine
  SITE 13: note = alpha-methyl-leucine
  SITE 17: note = Lysine is chemically modified through conjugation of the epsilon-amino group of the Lysine side chain with (gamma-Glu)2-CO-(CH2)16-CO2H
  SITE 20: note = 3-(4-Pyridyl)-L-alanine
YXQGTFTSDXSQXLDKKAQXAFIEYLIAGGPSSGEPPPEGS

SEQ ID NO: 977 - protein, 43 aa, synthetic construct
  SITE 2: note = 2-Aminoisobutyric Acid
  SITE 10: note = 3-(4-Pyridyl)-L-alanine
  SITE 13: note = alpha-methyl-leucine
  SITE 17: note = Lysine is chemically modified through conjugation of the epsilon-amino group of the Lysine side chain with (gamma-Glu)2-CO-(CH2)16-CO2H
  SITE 20: note = 3-(4-Pyridyl)-L-alanine
YXQGTFTSDXSQXLDKKAQXAFIEYLIAGGPSSGEPPPSGSGE

SEQ ID NO: 978 - protein, 43 aa, synthetic construct
  SITE 2: note = 2-Aminoisobutyric Acid
  SITE 10: note = 3-(4-Pyridyl)-L-alanine
  SITE 12: note = L-ornithine
  SITE 13: note = alpha-methyl-leucine
  SITE 16: note = L-ornithine
  SITE 17: note = Lysine is chemically modified through conjugation of the epsilon-amino group of the Lysine side chain with (gamma-Glu)2-CO-(CH2)16-CO2H
  SITE 20: note = 3-(4-Pyridyl)-L-alanine
  SITE 25: note = alpha-methyl-L-tyrosine
  SITE 43: note = Amidated residue
YXQGTFTSDXSXXLDXKAQXQFIEXLIEGGPSSGAPPPSGSEE

SEQ ID NO: 979 - protein, 43 aa, synthetic construct
  SITE 2: note = 2-Aminoisobutyric Acid
  SITE 10: note = 3-(4-Pyridyl)-L-alanine
  SITE 12: note = L-ornithine
  SITE 13: note = alpha-methyl-leucine
  SITE 16: note = L-ornithine
  SITE 17: note = Lysine is chemically modified through conjugation of the epsilon-amino group of the Lysine side chain with (gamma-Glu)2-CO-(CH2)16-CO2H
  SITE 20: note = 3-(4-Pyridyl)-L-alanine
  SITE 25: note = alpha-methyl-L-tyrosine
  SITE 43: note = Amidated residue
YXQGTFTSDXSXXLDXKAQXEFIEXLIEGGPSSGAPPPSGSEE

SEQ ID NO: 980 - protein, 43 aa, synthetic construct
  SITE 2: note = 2-Aminoisobutyric Acid
  SITE 10: note = 3-(4-Pyridyl)-L-alanine
  SITE 12: note = L-ornithine
  SITE 13: note = alpha-methyl-leucine
  SITE 16: note = L-ornithine
  SITE 17: note = Lysine is chemically modified through conjugation of the epsilon-amino group of the Lysine side chain with (gamma-Glu)2-CO-(CH2)16-CO2H
  SITE 20: note = 3-(4-Pyridyl)-L-alanine
  SITE 21: note = L-ornithine
  SITE 25: note = alpha-methyl-L-tyrosine
  SITE 43: note = Amidated residue
YXQGTFTSDXSXXLDXKAQXXFIEXLIEGGPSSGAPPPSGSEE

SEQ ID NO: 981 - protein, 43 aa, synthetic construct
  SITE 2: note = 2-Aminoisobutyric Acid
  SITE 10: note = 3-(4-Pyridyl)-L-alanine
  SITE 12: note = L-ornithine
  SITE 13: note = alpha-methyl-leucine
  SITE 16: note = L-ornithine
  SITE 17: note = Lysine is chemically modified through conjugation of the epsilon-amino group of the Lysine side chain with (gamma-Glu)2-CO-(CH2)16-CO2H
  SITE 20: note = 3-(4-Pyridyl)-L-alanine
  SITE 25: note = alpha-methyl-L-tyrosine
  SITE 43: note = Amidated residue
YXQGTFTSDXSXXLDXKAQXQFIEXLLEGGPSSGAPPPSGSEE

SEQ ID NO: 982 - protein, 43 aa, synthetic construct
  SITE 2: note = 2-Aminoisobutyric Acid
  SITE 10: note = 3-(4-Pyridyl)-L-alanine
  SITE 12: note = L-ornithine
  SITE 13: note = alpha-methyl-leucine
  SITE 16: note = L-ornithine
  SITE 17: note = Lysine is chemically modified through conjugation of the epsilon-amino group of the Lysine side chain with (gamma-Glu)2-CO-(CH2)16-CO2H
  SITE 20: note = 3-(4-Pyridyl)-L-alanine
  SITE 25: note = alpha-methyl-L-tyrosine
  SITE 43: note = Amidated residue
YXQGTFTSDXSXXLDXKAQXEFIEXLLEGGPSSGAPPPSGSEE

SEQ ID NO: 983 - protein, 42 aa, synthetic construct
  SITE 2: note = 2-Aminoisobutyric Acid
  SITE 10: note = 3-(4-Pyridyl)-L-alanine
  SITE 13: note = alpha-methyl-leucine
  SITE 16: note = L-ornithine
  SITE 17: note = Lysine is chemically modified through conjugation of the epsilon-amino group of the Lysine side chain with (gamma-Glu)2-CO-(CH2)16-CO2H
  SITE 20: note = 3-(4-Pyridyl)-L-alanine
YXQGTFTSDXSQXLDXKAQXAFIEYLIAGGPSSGEPPPSGSE

SEQ ID NO: 984 - protein, 43 aa, synthetic construct
  SITE 2: note = 2-Aminoisobutyric Acid
  SITE 10: note = 3-(4-Pyridyl)-L-alanine
  SITE 13: note = alpha-methyl-leucine
  SITE 16: note = L-ornithine
  SITE 17: note = Lysine is chemically modified through conjugation of the epsilon-amino group of the Lysine side chain with (gamma-Glu)2-CO-(CH2)16-CO2H
  SITE 20: note = 3-(4-Pyridyl)-L-alanine
YXQGTFTSDXSQXLDXKAQXAFIEYLIAGGPSSGEPPPSGSGE

SEQ ID NO: 985 - protein, 41 aa, synthetic construct
  SITE 2: note = 2-Aminoisobutyric Acid
  SITE 10: note = 3-(4-Pyridyl)-L-alanine
  SITE 12: note = L-ornithine
  SITE 13: note = alpha-methyl-leucine
  SITE 17: note = Lysine is chemically modified through conjugation of the epsilon-amino group of the Lysine side chain with (gamma-Glu)2-CO-(CH2)16-CO2H
  SITE 20: note = 3-(4-Pyridyl)-L-alanine
  SITE 41: note = Amidated residue
YXQGTFTSDXSXXLDKKAQXAFIEYLIAGGPSSGEPPPSGE

SEQ ID NO: 986 - protein, 42 aa, synthetic construct
  SITE 2: note = 2-Aminoisobutyric Acid
  SITE 10: note = 3-(4-Pyridyl)-L-alanine
  SITE 12: note = L-ornithine
  SITE 13: note = alpha-methyl-leucine
  SITE 17: note = Lysine is chemically modified through conjugation of the epsilon-amino group of the Lysine side chain with (gamma-Glu)2-CO-(CH2)16-CO2H
  SITE 20: note = 3-(4-Pyridyl)-L-alanine
  SITE 42: note = Amidated residue
YXQGTFTSDXSXXLDKKAQXAFIEYLIAGGPSSGEPPPSGTE

SEQ ID NO: 987 - protein, 43 aa, synthetic construct
  SITE 2: note = 2-Aminoisobutyric Acid
  SITE 10: note = 3-(4-Pyridyl)-L-alanine
  SITE 12: note = L-ornithine
  SITE 13: note = alpha-methyl-leucine
  SITE 17: note = Lysine is chemically modified through conjugation of the epsilon-amino group of the Lysine side chain with (gamma-Glu)2-CO-(CH2)16-CO2H
  SITE 20: note = 3-(4-Pyridyl)-L-alanine
  SITE 43: note = Amidated residue
YXQGTFTSDXSXXLDKKAQXAFIEYLIAGGPSSGEPPPSGTEE

SEQ ID NO: 988 - protein, 44 aa, synthetic construct
  SITE 2: note = 2-Aminoisobutyric Acid
  SITE 10: note = 3-(4-Pyridyl)-L-alanine
  SITE 12: note = L-ornithine
  SITE 13: note = alpha-methyl-leucine
  SITE 17: note = Lysine is chemically modified through conjugation of the epsilon-amino group of the Lysine side chain with (gamma-Glu)2-CO-(CH2)16-CO2H
  SITE 20: note = 3-(4-Pyridyl)-L-alanine
  SITE 44: note = Amidated residue
YXQGTFTSDXSXXLDKKAQXAFIEYLIAGGPSSGEPPPSGTEEE

SEQ ID NO: 989 - protein, 41 aa, synthetic construct
  SITE 2: note = 2-Aminoisobutyric Acid
  SITE 10: note = 3-(4-Pyridyl)-L-alanine
  SITE 12: note = L-ornithine
  SITE 13: note = alpha-methyl-leucine
  SITE 16: note = L-ornithine
  SITE 17: note = Lysine is chemically modified through conjugation of the epsilon-amino group of the Lysine side chain with (gamma-Glu)2-CO-(CH2)16-CO2H
  SITE 20: note = 3-(4-Pyridyl)-L-alanine
  SITE 41: note = Amidated residue
YXQGTFTSDXSXXLDXKAQXAFIEYLIAGGPSSGEPPPSGE

SEQ ID NO: 990 - protein, 42 aa, synthetic construct
  SITE 2: note = 2-Aminoisobutyric Acid
  SITE 10: note = 3-(4-Pyridyl)-L-alanine
  SITE 12: note = L-ornithine
  SITE 13: note = alpha-methyl-leucine
  SITE 16: note = L-ornithine
  SITE 17: note = Lysine is chemically modified through conjugation of the epsilon-amino group of the Lysine side chain with (gamma-Glu)2-CO-(CH2)16-CO2H
  SITE 20: note = 3-(4-Pyridyl)-L-alanine
  SITE 42: note = Amidated residue
YXQGTFTSDXSXXLDXKAQXAFIEYLIAGGPSSGEPPPSGTE

SEQ ID NO: 991 - protein, 43 aa, synthetic construct
  SITE 2: note = 2-Aminoisobutyric Acid
  SITE 10: note = 3-(4-Pyridyl)-L-alanine
  SITE 12: note = L-ornithine
  SITE 13: note = alpha-methyl-leucine
  SITE 16: note = L-ornithine
  SITE 17: note = Lysine is chemically modified through conjugation of the epsilon-amino group of the Lysine side chain with (gamma-Glu)2-CO-(CH2)16-CO2H
  SITE 20: note = 3-(4-Pyridyl)-L-alanine
  SITE 43: note = Amidated residue
YXQGTFTSDXSXXLDXKAQXAFIEYLIAGGPSSGEPPPSGTEE

SEQ ID NO: 992 - protein, 44 aa, synthetic construct
  SITE 2: note = 2-Aminoisobutyric Acid
  SITE 10: note = 3-(4-Pyridyl)-L-alanine
  SITE 13: note = alpha-methyl-leucine
  SITE 16: note = L-ornithine
  SITE 17: note = Lysine is chemically modified through conjugation of the epsilon-amino group of the Lysine side chain with (gamma-Glu)2-CO-(CH2)16-CO2H
  SITE 20: note = 3-(4-Pyridyl)-L-alanine
  SITE 44: note = Amidated residue
YXQGTFTSDXSQXLDXKAQXAFIEYLIAGGPSSGEPPPSGTEEE

SEQ ID NO: 993 - protein, 41 aa, synthetic construct
  SITE 2: note = 2-Aminoisobutyric Acid
  SITE 10: note = 3-(4-Pyridyl)-L-alanine
  SITE 12: note = L-ornithine
  SITE 13: note = alpha-methyl-leucine
  SITE 17: note = Lysine is chemically modified through conjugation of the epsilon-amino group of the Lysine side chain with (2-[2-(2-Amino-ethoxy)-ethoxy]-acetyl)-(gamma-Glu)2-CO-(CH2 )16-CO2H
  SITE 20: note = 3-(4-Pyridyl)-L-alanine
  SITE 25: note = 3-(4-Pyridyl)-L-alanine
  SITE 29: note = 2-Aminoisobutyric Acid
  SITE 41: note = Amidated residue
YXQGTFTSDXSXXLDKKAQXAFIEXLIEXGPSSGEPPPSGS

SEQ ID NO: 994 - protein, 42 aa, synthetic construct
  SITE 2: note = 2-Aminoisobutyric Acid
  SITE 10: note = 3-(4-Pyridyl)-L-alanine
  SITE 12: note = L-ornithine
  SITE 13: note = alpha-methyl-leucine
  SITE 17: note = Lysine is chemically modified through conjugation of the epsilon-amino group of the Lysine side chain with (2-[2-(2-Amino-ethoxy)-ethoxy]-acetyl)-(gamma-Glu)2-CO-(CH2 )16-CO2H
  SITE 20: note = 3-(4-Pyridyl)-L-alanine
  SITE 25: note = 3-(4-Pyridyl)-L-alanine
  SITE 29: note = 2-Aminoisobutyric Acid
  SITE 42: note = Amidated residue
YXQGTFTSDXSXXLDKKAQXAFIEXLIEXGPSSGEPPPSGSE

SEQ ID NO: 995 - protein, 41 aa, synthetic construct; identical to SEQ ID NO: 993
  SITE 2: note = 2-Aminoisobutyric Acid
  SITE 10: note = 3-(4-Pyridyl)-L-alanine
  SITE 12: note = L-ornithine
  SITE 13: note = alpha-methyl-leucine
  SITE 17: note = Lysine is chemically modified through conjugation of the epsilon-amino group of the Lysine side chain with (gamma-Glu)2-CO-(CH2)16-CO2H
  SITE 20: note = 3-(4-Pyridyl)-L-alanine
  SITE 25: note = 3-(4-Pyridyl)-L-alanine
  SITE 29: note = 2-Aminoisobutyric Acid
  SITE 41: note = Amidated residue

SEQ ID NO: 996 - protein, 42 aa, synthetic construct; identical to SEQ ID NO: 994
  SITE 2: note = 2-Aminoisobutyric Acid
  SITE 10: note = 3-(4-Pyridyl)-L-alanine
  SITE 12: note = L-ornithine
  SITE 13: note = alpha-methyl-leucine
  SITE 17: note = Lysine is chemically modified through conjugation of the epsilon-amino group of the Lysine side chain with (gamma-Glu)2-CO-(CH2)16-CO2H
  SITE 20: note = 3-(4-Pyridyl)-L-alanine
  SITE 25: note = 3-(4-Pyridyl)-L-alanine
  SITE 29: note = 2-Aminoisobutyric Acid
  SITE 42: note = Amidated residue

SEQ ID NO: 997 - protein, 41 aa, synthetic construct
  SITE 2: note = 2-Aminoisobutyric Acid
  SITE 10: note = 3-(4-Pyridyl)-L-alanine
  SITE 12: note = L-ornithine
  SITE 13: note = alpha-methyl-leucine
  SITE 16: note = L-ornithine
  SITE 17: note = Lysine is chemically modified through conjugation of the epsilon-amino group of the Lysine side chain with (gamma-Glu)2-CO-(CH2)16-CO2H
  SITE 20: note = 3-(4-Pyridyl)-L-alanine
  SITE 25: note = 3-(4-Pyridyl)-L-alanine
  SITE 29: note = 2-Aminoisobutyric Acid
  SITE 41: note = Amidated residue
YXQGTFTSDXSXXLDXKAQXAFIEXLIEXGPSSGEPPPSGS

SEQ ID NO: 998 - protein, 43 aa, synthetic construct
  SITE 2: note = 2-Aminoisobutyric Acid
  SITE 10: note = 3-(4-Pyridyl)-L-alanine
  SITE 12: note = L-ornithine
  SITE 13: note = alpha-methyl-leucine
  SITE 16: note = L-ornithine
  SITE 17: note = Lysine is chemically modified through conjugation of the epsilon-amino group of the Lysine side chain with (gamma-Glu)2-CO-(CH2)16-CO2H
  SITE 20: note = 3-(4-Pyridyl)-L-alanine
  SITE 25: note = alpha-methyl-L-tyrosine
  SITE 43: note = Amidated residue
YXQGTFTSDXSXXLDXKAQXQFIEXLIAGGPSSGAPPPSGSEE

SEQ ID NO: 999 - protein, 43 aa, synthetic construct
  SITE 2: note = 2-Aminoisobutyric Acid
  SITE 10: note = 3-(4-Pyridyl)-L-alanine
  SITE 12: note = L-ornithine
  SITE 13: note = alpha-methyl-leucine
  SITE 16: note = L-ornithine
  SITE 17: note = Lysine is chemically modified through conjugation of the epsilon-amino group of the Lysine side chain with (gamma-Glu)2-CO-(CH2)16-CO2H
  SITE 20: note = 3-(4-Pyridyl)-L-alanine
  SITE 25: note = alpha-methyl-L-tyrosine
  SITE 43: note = Amidated residue
YXQGTFTSDXSXXLDXKAQXEFIEXLIAGGPSSGAPPPSGSEE

SEQ ID NO: 1000 - protein, 43 aa, synthetic construct
  SITE 2: note = 2-Aminoisobutyric Acid
  SITE 10: note = 3-(4-Pyridyl)-L-alanine
  SITE 12: note = L-ornithine
  SITE 13: note = alpha-methyl-leucine
  SITE 16: note = L-ornithine
  SITE 17: note = Lysine is chemically modified through conjugation of the epsilon-amino group of the Lysine side chain with (gamma-Glu)2-CO-(CH2)16-CO2H
  SITE 20: note = 3-(4-Pyridyl)-L-alanine
  SITE 21: note = L-ornithine
  SITE 25: note = alpha-methyl-L-tyrosine
  SITE 43: note = Amidated residue
YXQGTFTSDXSXXLDXKAQXXFIEXLIAGGPSSGAPPPSGSEE

SEQ ID NO: 1001 - protein, 43 aa, synthetic construct
  SITE 2: note = 2-Aminoisobutyric Acid
  SITE 10: note = 3-(4-Pyridyl)-L-alanine
  SITE 12: note = L-ornithine
  SITE 13: note = alpha-methyl-leucine
  SITE 16: note = L-ornithine
  SITE 17: note = Lysine is chemically modified through conjugation of the epsilon-amino group of the Lysine side chain with (gamma-Glu)2-CO-(CH2)16-CO2H
  SITE 20: note = 3-(4-Pyridyl)-L-alanine
  SITE 25: note = alpha-methyl-L-tyrosine
  SITE 43: note = Amidated residue
YXQGTFTSDXSXXLDXKAQXQFIEXLLAGGPSSGAPPPSGSEE

SEQ ID NO: 1002 - protein, 43 aa, synthetic construct
  SITE 2: note = 2-Aminoisobutyric Acid
  SITE 10: note = 3-(4-Pyridyl)-L-alanine
  SITE 12: note = L-ornithine
  SITE 13: note = alpha-methyl-leucine
  SITE 16: note = L-ornithine
  SITE 17: note = Lysine is chemically modified through conjugation of the epsilon-amino group of the Lysine side chain with (gamma-Glu)2-CO-(CH2)16-CO2H
  SITE 20: note = 3-(4-Pyridyl)-L-alanine
  SITE 25: note = alpha-methyl-L-tyrosine
  SITE 43: note = Amidated residue
YXQGTFTSDXSXXLDXKAQXEFIEXLLAGGPSSGAPPPSGSEE

SEQ ID NO: 1003 - protein, 43 aa, synthetic construct
  SITE 2: note = 2-Aminoisobutyric Acid
  SITE 10: note = 3-(4-Pyridyl)-L-alanine
  SITE 12: note = L-ornithine
  SITE 13: note = alpha-methyl-leucine
  SITE 16: note = L-ornithine
  SITE 17: note = Lysine is chemically modified through conjugation of the epsilon-amino group of the Lysine side chain with (gamma-Glu)2-CO-(CH2)16-CO2H
  SITE 20: note = 3-(4-Pyridyl)-L-alanine
  SITE 21: note = L-ornithine
  SITE 25: note = alpha-methyl-L-tyrosine
  SITE 43: note = Amidated residue
YXQGTFTSDXSXXLDXKAQXXFIEXLLAGGPSSGAPPPSGSEE

SEQ ID NO: 1004 - protein, 43 aa, synthetic construct
  SITE 2: note = 2-Aminoisobutyric Acid
  SITE 10: note = 3-(4-Pyridyl)-L-alanine
  SITE 13: note = alpha-methyl-leucine
  SITE 16: note = L-ornithine
  SITE 17: note = Lysine is chemically modified through conjugation of the epsilon-amino group of the Lysine side chain with (gamma-Glu)2-CO-(CH2)16-CO2H
  SITE 20: note = 3-(4-Pyridyl)-L-alanine
  SITE 25: note = alpha-methyl-L-tyrosine
  SITE 43: note = Amidated residue
YXQGTFTSDXSQXLDXKAQXQFIEXLLAGGPSSGAPPPSGSEE

SEQ ID NO: 1005 - protein, 43 aa, synthetic construct
  SITE 2: note = 2-Aminoisobutyric Acid
  SITE 10: note = 3-(4-Pyridyl)-L-alanine
  SITE 13: note = alpha-methyl-leucine
  SITE 16: note = L-ornithine
  SITE 17: note = Lysine is chemically modified through conjugation of the epsilon-amino group of the Lysine side chain with (gamma-Glu)2-CO-(CH2)16-CO2H
  SITE 20: note = 3-(4-Pyridyl)-L-alanine
  SITE 25: note = alpha-methyl-L-tyrosine
  SITE 43: note = Amidated residue
YXQGTFTSDXSQXLDXKAQXEFIEXLLAGGPSSGAPPPSGSEE

SEQ ID NO: 1006 - protein, 43 aa, synthetic construct
  SITE 2: note = 2-Aminoisobutyric Acid
  SITE 10: note = 3-(4-Pyridyl)-L-alanine
  SITE 12: note = L-ornithine
  SITE 13: note = alpha-methyl-leucine
  SITE 16: note = L-ornithine
  SITE 17: note = Lysine is chemically modified through conjugation of the epsilon-amino group of the Lysine side chain with (gamma-Glu)2-CO-(CH2)16-CO2H
  SITE 20: note = 3-(4-Pyridyl)-L-alanine
  SITE 43: note = Amidated residue
YXQGTFTSDXSXXLDXKAQXQFIEYLIAGGPSSGAPPPSGSEE

SEQ ID NO: 1007 - protein, 43 aa, synthetic construct
  SITE 2: note = 2-Aminoisobutyric Acid
  SITE 10: note = 3-(4-Pyridyl)-L-alanine
  SITE 12: note = L-ornithine
  SITE 13: note = alpha-methyl-leucine
  SITE 16: note = L-ornithine
  SITE 17: note = Lysine is chemically modified through conjugation of the epsilon-amino group of the Lysine side chain with (gamma-Glu)2-CO-(CH2)16-CO2H
  SITE 20: note = 3-(4-Pyridyl)-L-alanine
  SITE 43: note = Amidated residue
YXQGTFTSDXSXXLDXKAQXEFIEYLIAGGPSSGAPPPSGSEE

SEQ ID NO: 1008 - protein, 43 aa, synthetic construct
  SITE 2: note = 2-Aminoisobutyric Acid
  SITE 10: note = 3-(4-Pyridyl)-L-alanine
  SITE 12: note = L-ornithine
  SITE 13: note = alpha-methyl-leucine
  SITE 16: note = L-ornithine
  SITE 17: note = Lysine is chemically modified through conjugation of the epsilon-amino group of the Lysine side chain with (gamma-Glu)2-CO-(CH2)16-CO2H
  SITE 20: note = 3-(4-Pyridyl)-L-alanine
  SITE 43: note = Amidated residue
YXQGTFTSDXSXXLDXKAQXQFIEYLLAGGPSSGAPPPSGSEE

SEQ ID NO: 1009 - protein, 43 aa, synthetic construct
  SITE 2: note = 2-Aminoisobutyric Acid
  SITE 10: note = 3-(4-Pyridyl)-L-alanine
  SITE 12: note = L-ornithine
  SITE 13: note = alpha-methyl-leucine
  SITE 16: note = L-ornithine
  SITE 17: note = Lysine is chemically modified through conjugation of the epsilon-amino group of the Lysine side chain with (gamma-Glu)2-CO-(CH2)16-CO2H
  SITE 20: note = 3-(4-Pyridyl)-L-alanine
  SITE 43: note = Amidated residue
YXQGTFTSDXSXXLDXKAQXEFIEYLLAGGPSSGAPPPSGSEE

SEQ ID NO: 1010 - protein, 43 aa, synthetic construct
  SITE 2: note = 2-Aminoisobutyric Acid
  SITE 10: note = 3-(4-Pyridyl)-L-alanine
  SITE 12: note = L-ornithine
  SITE 13: note = alpha-methyl-leucine
  SITE 16: note = L-ornithine
  SITE 17: note = Lysine is chemically modified through conjugation of the epsilon-amino group of the Lysine side chain with (gamma-Glu)2-CO-(CH2)16-CO2H
  SITE 20: note = 3-(4-Pyridyl)-L-alanine
  SITE 21: note = L-ornithine
  SITE 43: note = Amidated residue
YXQGTFTSDXSXXLDXKAQXXFIEYLLAGGPSSGAPPPSGSEE

SEQ ID NO: 1011 - protein, 43 aa, synthetic construct
  SITE 2: note = 2-Aminoisobutyric Acid
  SITE 10: note = 3-(4-Pyridyl)-L-alanine
  SITE 13: note = alpha-methyl-leucine
  SITE 16: note = L-ornithine
  SITE 17: note = Lysine is chemically modified through conjugation of the epsilon-amino group of the Lysine side chain with (gamma-Glu)2-CO-(CH2)16-CO2H
  SITE 20: note = 3-(4-Pyridyl)-L-alanine
  SITE 43: note = Amidated residue
YXQGTFTSDXSQXLDXKAQXQFIEYLIAGGPSSGAPPPSGSEE

SEQ ID NO: 1012 - protein, 43 aa, synthetic construct
  SITE 2: note = 2-Aminoisobutyric Acid
  SITE 10: note = 3-(4-Pyridyl)-L-alanine
  SITE 13: note = alpha-methyl-leucine
  SITE 16: note = L-ornithine
  SITE 17: note = Lysine is chemically modified through conjugation of the epsilon-amino group of the Lysine side chain with (gamma-Glu)2-CO-(CH2)16-CO2H
  SITE 20: note = 3-(4-Pyridyl)-L-alanine
  SITE 43: note = Amidated residue
YXQGTFTSDXSQXLDXKAQXQFIEYLLAGGPSSGAPPPSGSEE

SEQ ID NO: 1013 - protein, 41 aa, synthetic construct
  SITE 2: note = 2-Aminoisobutyric Acid
  SITE 10: note = 3-(4-Pyridyl)-L-alanine
  SITE 13: note = alpha-methyl-leucine
  SITE 16: note = L-ornithine
  SITE 17: note = Lysine is chemically modified through conjugation of the epsilon-amino group of the Lysine side chain with (gamma-Glu)2-CO-(CH2)16-CO2H
  SITE 20: note = 3-(4-Pyridyl)-L-alanine
  SITE 41: note = Amidated residue
YXQGTFTSDXSQXLDXKAQXAFIEYLIAGGPSSGEPPPSGS

SEQ ID NO: 1014 - protein, 42 aa, synthetic construct; identical to SEQ ID NO: 983
  SITE 2: note = 2-Aminoisobutyric Acid
  SITE 10: note = 3-(4-Pyridyl)-L-alanine
  SITE 13: note = alpha-methyl-leucine
  SITE 16: note = L-ornithine
  SITE 17: note = Lysine is chemically modified through conjugation of the epsilon-amino group of the Lysine side chain with (gamma-Glu)2-CO-(CH2)16-CO2H
  SITE 20: note = 3-(4-Pyridyl)-L-alanine
  SITE 42: note = Amidated residue

SEQ ID NO: 1015 - protein, 42 aa, synthetic construct
  SITE 2: note = 2-Aminoisobutyric Acid
  SITE 10: note = 3-(4-Pyridyl)-L-alanine
  SITE 12: note = L-ornithine
  SITE 13: note = alpha-methyl-leucine
  SITE 17: note = Lysine is chemically modified through conjugation of the epsilon-amino group of the Lysine side chain with (gamma-Glu)2-CO-(CH2)16-CO2H
  SITE 20: note = 3-(4-Pyridyl)-L-alanine
  SITE 42: note = Amidated residue
YXQGTFTSDXSXXLDKKAQXAFIEYLIAGGPSSGAPPPSGSE

SEQ ID NO: 1016 - protein, 42 aa, synthetic construct
  SITE 2: note = 2-Aminoisobutyric Acid
  SITE 10: note = 3-(4-Pyridyl)-L-alanine
  SITE 12: note = L-ornithine
  SITE 13: note = alpha-methyl-leucine
  SITE 17: note = Lysine is chemically modified through conjugation of the epsilon-amino group of the Lysine side chain with (gamma-Glu)2-CO-(CH2)16-CO2H
  SITE 20: note = 3-(4-Pyridyl)-L-alanine
  SITE 42: note = Amidated residue
YXQGTFTSDXSXXLDKKAQXAFIEYLIAGGPSSGAPPPSESE

SEQ ID NO: 1017 - protein, 42 aa, synthetic construct
  SITE 2: note = 2-Aminoisobutyric Acid
  SITE 10: note = 3-(4-Pyridyl)-L-alanine
  SITE 12: note = L-ornithine
  SITE 13: note = alpha-methyl-leucine
  SITE 16: note = L-ornithine
  SITE 17: note = Lysine is chemically modified through conjugation of the epsilon-amino group of the Lysine side chain with (gamma-Glu)2-CO-(CH2)16-CO2H
  SITE 20: note = 3-(4-Pyridyl)-L-alanine
  SITE 42: note = Amidated residue
YXQGTFTSDXSXXLDXKAQXAFIEYLIAGGPSSGAPPPSGSE

SEQ ID NO: 1018 - protein, 42 aa, synthetic construct
  SITE 2: note = 2-Aminoisobutyric Acid
  SITE 10: note = 3-(4-Pyridyl)-L-alanine
  SITE 12: note = L-ornithine
  SITE 13: note = alpha-methyl-leucine
  SITE 16: note = L-ornithine
  SITE 17: note = Lysine is chemically modified through conjugation of the epsilon-amino group of the Lysine side chain with (gamma-Glu)2-CO-(CH2)16-CO2H
  SITE 20: note = 3-(4-Pyridyl)-L-alanine
  SITE 42: note = Amidated residue
YXQGTFTSDXSXXLDXKAQXAFIEYLIAGGPSSGAPPPSESE

SEQ ID NO: 1019 - protein, 41 aa, synthetic construct
  SITE 2: note = 2-Aminoisobutyric Acid
  SITE 10: note = 3-(4-Pyridyl)-L-alanine
  SITE 12: note = L-ornithine
  SITE 13: note = alpha-methyl-leucine
  SITE 16: note = L-ornithine
  SITE 17: note = Lysine is chemically modified through conjugation of the epsilon-amino group of the Lysine side chain with (gamma-Glu)2-CO-(CH2)16-CO2H
  SITE 20: note = 3-(4-Pyridyl)-L-alanine
  SITE 25: note = alpha-methyl-L-tyrosine
  SITE 41: note = Amidated residue
YXQGTFTSDXSXXLDXKAQXAFIEXLIEGGPSSGAPPPSGS

SEQ ID NO: 1020 - protein, 41 aa, synthetic construct
  SITE 2: note = 2-Aminoisobutyric Acid
  SITE 10: note = 3-(4-Pyridyl)-L-alanine
  SITE 12: note = L-ornithine
  SITE 13: note = alpha-methyl-leucine
  SITE 17: note = Lysine is chemically modified through conjugation of the epsilon-amino group of the Lysine side chain with (gamma-Glu)2-CO-(CH2)16-CO2H
  SITE 20: note = 3-(4-Pyridyl)-L-alanine
  SITE 25: note = alpha-methyl-L-tyrosine
  SITE 41: note = Amidated residue
YXQGTFTSDXSXXLDKKAQXAFIEXLIAGGPSSGEPPPSGS

SEQ ID NO: 1021 - protein, 41 aa, synthetic construct
  SITE 2: note = 2-Aminoisobutyric Acid
  SITE 10: note = 3-(4-Pyridyl)-L-alanine
  SITE 12: note = L-ornithine
  SITE 13: note = alpha-methyl-leucine
  SITE 17: note = Lysine is chemically modified through conjugation of the epsilon-amino group of the Lysine side chain with (gamma-Glu)2-CO-(CH2)16-CO2H
  SITE 20: note = 3-(4-Pyridyl)-L-alanine
  SITE 25: note = alpha-methyl-L-tyrosine
  SITE 41: note = Amidated residue
YXQGTFTSDXSXXLDKKAQXAFIEXLIAGGPSSGAPPPEGS

SEQ ID NO: 1022 - protein, 41 aa, synthetic construct
  SITE 2: note = 2-Aminoisobutyric Acid
  SITE 10: note = 3-(4-Pyridyl)-L-alanine
  SITE 13: note = alpha-methyl-leucine
  SITE 16: note = L-ornithine
  SITE 17: note = Lysine is chemically modified through conjugation of the epsilon-amino group of the Lysine side chain with (2-[2-(2-Amino-ethoxy)-ethoxy]-acetyl)-(gamma-Glu)2-CO-(CH2 )16-CO2H
  SITE 20: note = 3-(4-Pyridyl)-L-alanine
  SITE 29: note = D-amino acid
  SITE 41: note = Amidated residue
YXQGTFTSDXSQXLDXKAQXAFIEYLIEAGPSSGAPPPSGS

SEQ ID NO: 1023 - protein, 41 aa, synthetic construct; identical to SEQ ID NO: 1022
  SITE 2: note = 2-Aminoisobutyric Acid
  SITE 10: note = 3-(4-Pyridyl)-L-alanine
  SITE 13: note = alpha-methyl-leucine
  SITE 16: note = L-ornithine
  SITE 17: note = Lysine is chemically modified through conjugation of the epsilon-amino group of the Lysine side chain with (gamma-Glu)2-CO-(CH2)16-CO2H
  SITE 20: note = 3-(4-Pyridyl)-L-alanine
  SITE 29: note = D-amino acid
  SITE 41: note = Amidated residue

SEQ ID NO: 1024 - protein, 41 aa, synthetic construct
  SITE 2: note = 2-Aminoisobutyric Acid
  SITE 10: note = 3-(4-Pyridyl)-L-alanine
  SITE 13: note = alpha-methyl-leucine
  SITE 16: note = L-ornithine
  SITE 17: note = Lysine is chemically modified through conjugation of the epsilon-amino group of the Lysine side chain with (2-[2-(2-Amino-ethoxy)-ethoxy]-acetyl)-(gamma-Glu)2-CO-(CH2 )16-CO2H
  SITE 20: note = 3-(4-Pyridyl)-L-alanine
  SITE 29: note = D-amino acid
  SITE 41: note = Amidated residue
YXQGTFTSDXSQXLDXKAQXAFIEYLIEAGPSSGEPPPSGS

SEQ ID NO: 1025 - protein, 41 aa, synthetic construct; identical to SEQ ID NO: 1024
  SITE 2: note = 2-Aminoisobutyric Acid
  SITE 10: note = 3-(4-Pyridyl)-L-alanine
  SITE 13: note = alpha-methyl-leucine
  SITE 16: note = L-ornithine
  SITE 17: note = Lysine is chemically modified through conjugation of the epsilon-amino group of the Lysine side chain with (gamma-Glu)2-CO-(CH2)16-CO2H
  SITE 20: note = 3-(4-Pyridyl)-L-alanine
  SITE 29: note = D-amino acid
  SITE 41: note = Amidated residue

SEQ ID NO: 1026 - protein, 41 aa, synthetic construct
  SITE 2: note = 2-Aminoisobutyric Acid
  SITE 10: note = 3-(4-Pyridyl)-L-alanine
  SITE 13: note = alpha-methyl-leucine
  SITE 16: note = L-ornithine
  SITE 17: note = Lysine is chemically modified through conjugation of the epsilon-amino group of the Lysine side chain with (2-[2-(2-Amino-ethoxy)-ethoxy]-acetyl)-(gamma-Glu)2-CO-(CH2 )16-CO2H
  SITE 20: note = 3-(4-Pyridyl)-L-alanine
  SITE 29: note = D-amino acid
  SITE 41: note = Amidated residue
YXQGTFTSDXSQXLDXKAQXAFIEYLIEAGPSSGAPPPEGS

SEQ ID NO: 1027 - protein, 41 aa, synthetic construct; identical to SEQ ID NO: 1026
  SITE 2: note = 2-Aminoisobutyric Acid
  SITE 10: note = 3-(4-Pyridyl)-L-alanine
  SITE 13: note = alpha-methyl-leucine
  SITE 16: note = L-ornithine
  SITE 17: note = Lysine is chemically modified through conjugation of the epsilon-amino group of the Lysine side chain with (gamma-Glu)2-CO-(CH2)16-CO2H
  SITE 20: note = 3-(4-Pyridyl)-L-alanine
  SITE 29: note = D-amino acid
  SITE 41: note = Amidated residue

SEQ ID NO: 1028 - protein, 42 aa, synthetic construct
  SITE 2: note = 2-Aminoisobutyric Acid
  SITE 10: note = 3-(4-Pyridyl)-L-alanine
  SITE 13: note = alpha-methyl-leucine
  SITE 16: note = L-ornithine
  SITE 17: note = Lysine is chemically modified through conjugation of the epsilon-amino group of the Lysine side chain with (2-[2-(2-Amino-ethoxy)-ethoxy]-acetyl)-(gamma-Glu)2-CO-(CH2 )16-CO2H
  SITE 20: note = 3-(4-Pyridyl)-L-alanine
  SITE 29: note = D-amino acid
  SITE 42: note = Amidated residue
YXQGTFTSDXSQXLDXKAQXAFIEYLIEAGPSSGAPPPSGSE

SEQ ID NO: 1029 - protein, 42 aa, synthetic construct; identical to SEQ ID NO: 1028
  SITE 2: note = 2-Aminoisobutyric Acid
  SITE 10: note = 3-(4-Pyridyl)-L-alanine
  SITE 13: note = alpha-methyl-leucine
  SITE 16: note = L-ornithine
  SITE 17: note = Lysine is chemically modified through conjugation of the epsilon-amino group of the Lysine side chain with (gamma-Glu)2-CO-(CH2)16-CO2H
  SITE 20: note = 3-(4-Pyridyl)-L-alanine
  SITE 29: note = D-amino acid
  SITE 42: note = Amidated residue

SEQ ID NO: 1030 - protein, 42 aa, synthetic construct
  SITE 2: note = 2-Aminoisobutyric Acid
  SITE 10: note = 3-(4-Pyridyl)-L-alanine
  SITE 13: note = alpha-methyl-leucine
  SITE 17: note = Lysine is chemically modified through conjugation of the epsilon-amino group of the Lysine side chain with (2-[2-(2-Amino-ethoxy)-ethoxy]-acetyl)-(gamma-Glu)2-CO-(CH2 )16-CO2H
  SITE 20: note = 3-(4-Pyridyl)-L-alanine
  SITE 29: note = D-amino acid
  SITE 42: note = Amidated residue
YXQGTFTSDXSQXLDKKAQXAFIEYLIEAGPSSGAPPPSGSE

SEQ ID NO: 1031 - protein, 42 aa, synthetic construct; identical to SEQ ID NO: 1030
  SITE 2: note = 2-Aminoisobutyric Acid
  SITE 10: note = 3-(4-Pyridyl)-L-alanine
  SITE 13: note = alpha-methyl-leucine
  SITE 17: note = Lysine is chemically modified through conjugation of the epsilon-amino group of the Lysine side chain with (gamma-Glu)2-CO-(CH2)16-CO2H
  SITE 20: note = 3-(4-Pyridyl)-L-alanine
  SITE 29: note = D-amino acid
  SITE 42: note = Amidated residue

SEQ ID NO: 1032 - protein, 43 aa, synthetic construct
  SITE 2: note = 2-Aminoisobutyric Acid
  SITE 10: note = 3-(4-Pyridyl)-L-alanine
  SITE 13: note = alpha-methyl-leucine
  SITE 16: note = L-ornithine
  SITE 17: note = Lysine is chemically modified through conjugation of the epsilon-amino group of the Lysine side chain with (gamma-Glu)2-CO-(CH2)16-CO2H
  SITE 20: note = 3-(4-Pyridyl)-L-alanine
  SITE 25: note = alpha-methyl-L-tyrosine
  SITE 43: note = Amidated residue
YXQGTFTSDXSQXLDXKAQXQFIEXLIEGGPSSGEPPPSGSEE

SEQ ID NO: 1033 - protein, 43 aa, synthetic construct
  SITE 2: note = 2-Aminoisobutyric Acid
  SITE 10: note = 3-(4-Pyridyl)-L-alanine
  SITE 13: note = alpha-methyl-leucine
  SITE 16: note = L-ornithine
  SITE 17: note = Lysine is chemically modified through conjugation of the epsilon-amino group of the Lysine side chain with (gamma-Glu)2-CO-(CH2)16-CO2H
  SITE 20: note = 3-(4-Pyridyl)-L-alanine
  SITE 25: note = alpha-methyl-L-tyrosine
  SITE 43: note = Amidated residue
YXQGTFTSDXSQXLDXKAQXAFIEXLIEGGPSSGEPPPSGSEE

SEQ ID NO: 1034 - protein, 43 aa, synthetic construct; identical to SEQ ID NO: 1033
  SITE 2: note = 2-Aminoisobutyric Acid
  SITE 10: note = 3-(4-Pyridyl)-L-alanine
  SITE 13: note = alpha-methyl-leucine
  SITE 16: note = L-ornithine
  SITE 17: note = Lysine is chemically modified through conjugation of the epsilon-amino group of the Lysine side chain with (gamma-Glu)2-(Glu)-CO-(CH2)16-CO2H
  SITE 20: note = 3-(4-Pyridyl)-L-alanine
  SITE 25: note = alpha-methyl-L-tyrosine
  SITE 43: note = Amidated residue

SEQ ID NO: 1035 - protein, 43 aa, synthetic construct; identical to SEQ ID NO: 966
  SITE 2: note = 2-Aminoisobutyric Acid
  SITE 10: note = 3-(4-Pyridyl)-L-alanine
  SITE 13: note = alpha-methyl-leucine
  SITE 17: note = Lysine is chemically modified through conjugation of the epsilon-amino group of the Lysine side chain with (2-[2-(2-Amino-ethoxy)-ethoxy]-acetyl)-(gamma-Glu)-CO-(CH2) 16-CO2H
  SITE 20: note = 3-(4-Pyridyl)-L-alanine
  SITE 43: note = Amidated residue

SEQ ID NO: 1036 - protein, 43 aa, synthetic construct; identical to SEQ ID NO: 966
  SITE 2: note = 2-Aminoisobutyric Acid
  SITE 10: note = 3-(4-Pyridyl)-L-alanine
  SITE 13: note = alpha-methyl-leucine
  SITE 17: note = Lysine is chemically modified through conjugation of the epsilon-amino group of the Lysine side chain with (Glu)-(gamma-Glu)-CO-(CH2)16-CO2H
  SITE 20: note = 3-(4-Pyridyl)-L-alanine
  SITE 43: note = Amidated residue

SEQ ID NO: 1037 - protein, 43 aa, synthetic construct
  SITE 2: note = 2-Aminoisobutyric Acid
  SITE 10: note = 3-(4-Pyridyl)-L-alanine
  SITE 13: note = alpha-methyl-leucine
  SITE 16: note = L-ornithine
  SITE 17: note = Lysine is chemically modified through conjugation of the epsilon-amino group of the Lysine side chain with (gamma-Glu)2-CO-(CH2)16-CO2H
  SITE 20: note = 3-(4-Pyridyl)-L-alanine
  SITE 43: note = Amidated residue
YXQGTFTSDXSQXLDXKAQXAFIEYLIAGGPSSGAPPPSGSEE

SEQ ID NO: 1038 - protein, 44 aa, synthetic construct
  SITE 2: note = 2-Aminoisobutyric Acid
  SITE 10: note = 3-(4-Pyridyl)-L-alanine
  SITE 13: note = alpha-methyl-leucine
  SITE 16: note = L-ornithine
  SITE 18: note = Lysine is chemically modified through conjugation of the epsilon-amino group of the Lysine side chain with (Glu)-(gamma-Glu)-CO-(CH2)16-CO2H
  SITE 21: note = 3-(4-Pyridyl)-L-alanine
  SITE 44: note = Amidated residue
YXQGTFTSDXSQXLDXKKAQXAFIEYLIAGGPSSGAPPPSGSEE

SEQ ID NO: 1039 - protein, 43 aa, synthetic construct; identical to SEQ ID NO: 1037
  SITE 2: note = 2-Aminoisobutyric Acid
  SITE 10: note = 3-(4-Pyridyl)-L-alanine
  SITE 13: note = alpha-methyl-leucine
  SITE 16: note = L-ornithine
  SITE 17: note = Lysine is chemically modified through conjugation of the epsilon-amino group of the Lysine side chain with (Glu)2-(gamma-Glu)-CO-(CH2)16-CO2H
  SITE 20: note = 3-(4-Pyridyl)-L-alanine
  SITE 43: note = Amidated residue

SEQ ID NO: 1040 - protein, 43 aa, synthetic construct; identical to SEQ ID NO: 1037
  SITE 2: note = 2-Aminoisobutyric Acid
  SITE 10: note = 3-(4-Pyridyl)-L-alanine
  SITE 13: note = alpha-methyl-leucine
  SITE 16: note = L-ornithine
  SITE 17: note = Lysine is chemically modified through conjugation of the epsilon-amino group of the Lysine side chain with D-Glutamic acid-(Glu)2-CO-(CH2)16-CO2H
  SITE 20: note = 3-(4-Pyridyl)-L-alanine
  SITE 43: note = Amidated residue

SEQ ID NO: 1041 - protein, 43 aa, synthetic construct; identical to SEQ ID NO: 1037
  SITE 2: note = 2-Aminoisobutyric Acid
  SITE 10: note = 3-(4-Pyridyl)-L-alanine
  SITE 13: note = alpha-methyl-leucine
  SITE 16: note = L-ornithine
  SITE 17: note = Lysine is chemically modified through conjugation of the epsilon-amino group of the Lysine side chain with (gamma-Glu)2-CO-(CH2)16-CO2H
  SITE 20: note = 3-(4-Pyridyl)-L-alanine
  SITE 43: note = Amidated residue

SEQ ID NO: 1042 - protein, 43 aa, synthetic construct
  SITE 2: note = 2-Aminoisobutyric Acid
  SITE 10: note = 3-(4-Pyridyl)-L-alanine
  SITE 13: note = alpha-methyl-leucine
  SITE 17: note = Lysine is chemically modified through conjugation of the epsilon-amino group of the Lysine side chain with (gamma-Glu)2-CO-(CH2)16-CO2H
  SITE 20: note = 3-(4-Pyridyl)-L-alanine
  SITE 43: note = Amidated residue
YXQGTFTSDXSQXLDKKAQXAFIEYLLAGGPSSGAPPPSGSEE

SEQ ID NO: 1043 - protein, 43 aa, synthetic construct; identical to SEQ ID NO: 1042
  SITE 2: note = 2-Aminoisobutyric Acid
  SITE 10: note = 3-(4-Pyridyl)-L-alanine
  SITE 13: note = alpha-methyl-leucine
  SITE 17: note = Lysine is chemically modified through conjugation of the epsilon-amino group of the Lysine side chain with (2-[2-(2-Amino-ethoxy)-ethoxy]-acetyl)-(gamma-Glu)-CO-(CH2) 16-CO2H
  SITE 20: note = 3-(4-Pyridyl)-L-alanine
  SITE 43: note = Amidated residue

SEQ ID NO: 1044 - protein, 44 aa, synthetic construct
  SITE 2: note = 2-Aminoisobutyric Acid
  SITE 13: note = alpha-methyl-leucine
  SITE 16: note = L-ornithine
  SITE 17: note = Lysine is chemically modified through conjugation of the epsilon-amino group of the Lysine side chain with (2-[2-(2-Amino-ethoxy)-ethoxy]-acetyl)-(gamma-Glu)-CO-(CH2) 16-CO2H
  SITE 20: note = 2-Aminoisobutyric Acid
  SITE 29: note = D-amino acid
  SITE 44: note = Amidated residue
YXQGTFTSDFSQXLDXKAQXAFIEYLLEAGPSSGAPPPSGSEEE

SEQ ID NO: 1045 - protein, 44 aa, synthetic construct; identical to SEQ ID NO: 1044
  SITE 2: note = 2-Aminoisobutyric Acid
  SITE 13: note = alpha-methyl-leucine
  SITE 16: note = L-ornithine
  SITE 17: note = Lysine is chemically modified through conjugation of the epsilon-amino group of the Lysine side chain with (gamma-Glu)2-CO-(CH2)16-CO2H
  SITE 20: note = 2-Aminoisobutyric Acid
  SITE 29: note = D-amino acid
  SITE 44: note = Amidated residue

SEQ ID NO: 1046 - protein, 44 aa, synthetic construct
  SITE 2: note = 2-Aminoisobutyric Acid
  SITE 13: note = alpha-methyl-leucine
  SITE 16: note = L-ornithine
  SITE 17: note = Lysine is chemically modified through conjugation of the epsilon-amino group of the Lysine side chain with (gamma-Glu)2-CO-(CH2)16-CO2H
  SITE 20: note = 2-Aminoisobutyric Acid
  SITE 25: note = 3-(4-Pyridyl)-L-alanine
  SITE 29: note = D-amino acid
  SITE 44: note = Amidated residue
YXQGTFTSDFSQXLDXKAQXAFIEXLLEAGPSSGAPPPSGSEEE

SEQ ID NO: 1047 - protein, 43 aa, synthetic construct
  SITE 2: note = 2-Aminoisobutyric Acid
  SITE 10: note = 3-(4-Pyridyl)-L-alanine
  SITE 13: note = alpha-methyl-leucine
  SITE 16: note = L-ornithine
  SITE 17: note = Lysine is chemically modified through conjugation of the epsilon-amino group of the Lysine side chain with (2-[2-(2-Amino-ethoxy)-ethoxy]-acetyl)-(gamma-Glu)-CO-(CH2) 16-CO2H
  SITE 20: note = 3-(4-Pyridyl)-L-alanine
  SITE 25: note = alpha-methyl-L-tyrosine
  SITE 43: note = Amidated residue
YXQGTFTSDXSQXLDXKAQXAFIEXLIEGGPSSGAPPPSGSEE

SEQ ID NO: 1048 - protein, 43 aa, synthetic construct; identical to SEQ ID NO: 1047
  SITE 2: note = 2-Aminoisobutyric Acid
  SITE 10: note = 3-(4-Pyridyl)-L-alanine
  SITE 13: note = alpha-methyl-leucine
  SITE 16: note = L-ornithine
  SITE 17: note = Lysine is chemically modified through conjugation of the epsilon-amino group of the Lysine side chain with (2-[2-(2-Amino-ethoxy)-ethoxy]-acetyl)-(gamma-Glu)-CO-(CH2) 16-CO2H
  SITE 20: note = 3-(4-Pyridyl)-L-alanine
  SITE 24: note = D-amino acid
  SITE 25: note = alpha-methyl-L-tyrosine
  SITE 43: note = Amidated residue

SEQ ID NO: 1049 - protein, 43 aa, synthetic construct; identical to SEQ ID NO: 1047
  SITE 2: note = 2-Aminoisobutyric Acid
  SITE 10: note = 3-(4-Pyridyl)-L-alanine
  SITE 13: note = alpha-methyl-leucine
  SITE 16: note = L-ornithine
  SITE 17: note = Lysine is chemically modified through conjugation of the epsilon-amino group of the Lysine side chain with (gamma-Glu)2-CO-(CH2)16-CO2H
  SITE 20: note = 3-(4-Pyridyl)-L-alanine
  SITE 25: note = alpha-methyl-L-tyrosine
  SITE 43: note = Amidated residue

SEQ ID NO: 1050 - protein, 43 aa, synthetic construct; identical to SEQ ID NO: 1047
  SITE 2: note = 2-Aminoisobutyric Acid
  SITE 10: note = 3-(4-Pyridyl)-L-alanine
  SITE 13: note = alpha-methyl-leucine
  SITE 16: note = L-ornithine
  SITE 17: note = Lysine is chemically modified through conjugation of the epsilon-amino group of the Lysine side chain with (gamma-Glu)2-CO-(CH2)16-CO2H
  SITE 20: note = 3-(4-Pyridyl)-L-alanine
  SITE 24: note = D-amino acid
  SITE 25: note = alpha-methyl-L-tyrosine
  SITE 43: note = Amidated residue

SEQ ID NO: 1051 - protein, 43 aa, synthetic construct
  SITE 2: note = 2-Aminoisobutyric Acid
  SITE 10: note = 3-(4-Pyridyl)-L-alanine
  SITE 13: note = alpha-methyl-leucine
  SITE 16: note = L-ornithine
  SITE 17: note = Lysine is chemically modified through conjugation of the epsilon-amino group of the Lysine side chain with (2-[2-(2-Amino-ethoxy)-ethoxy]-acetyl)-(gamma-Glu)-CO-(CH2) 16-CO2H
  SITE 20: note = 3-(4-Pyridyl)-L-alanine
  SITE 25: note = alpha-methyl-L-tyrosine
  SITE 43: note = Amidated residue
YXQGTFTSDXSQXLDXKAQXQFIEXLIEGGPSSGAPPPSGSEE

SEQ ID NO: 1052 - protein, 43 aa, synthetic construct; identical to SEQ ID NO: 1051
  SITE 2: note = 2-Aminoisobutyric Acid
  SITE 10: note = 3-(4-Pyridyl)-L-alanine
  SITE 13: note = alpha-methyl-leucine
  SITE 16: note = L-ornithine
  SITE 17: note = Lysine is chemically modified through conjugation of the epsilon-amino group of the Lysine side chain with (gamma-Glu)2-CO-(CH2)16-CO2H
  SITE 20: note = 3-(4-Pyridyl)-L-alanine
  SITE 25: note = alpha-methyl-L-tyrosine
  SITE 43: note = Amidated residue

SEQ ID NO: 1053 - protein, 43 aa, synthetic construct
  SITE 2: note = 2-Aminoisobutyric Acid
  SITE 12: note = L-ornithine
  SITE 13: note = alpha-methyl-leucine
  SITE 17: note = Lysine is chemically modified through conjugation of the epsilon-amino group of the Lysine side chain with (gamma-Glu)2-CO-(CH2)16-CO2H
  SITE 20: note = 2-Aminoisobutyric Acid
  SITE 43: note = Amidated residue
YXQGTFTSDFSXXLDKKAQXAFIEYLLEGGPSSGAPPPGGSEE

SEQ ID NO: 1054 - protein, 43 aa, synthetic construct
  SITE 2: note = 2-Aminoisobutyric Acid
  SITE 12: note = L-ornithine
  SITE 13: note = alpha-methyl-leucine
  SITE 16: note = L-ornithine
  SITE 17: note = Lysine is chemically modified through conjugation of the epsilon-amino group of the Lysine side chain with (gamma-Glu)2-CO-(CH2)16-CO2H
  SITE 20: note = 2-Aminoisobutyric Acid
  SITE 43: note = Amidated residue
YXQGTFTSDFSXXLDXKAQXAFIEYLLEGGPSSGAPPPGGSEE

SEQ ID NO: 1055 - protein, 43 aa, synthetic construct
  SITE 2: note = 2-Aminoisobutyric Acid
  SITE 12: note = L-ornithine
  SITE 13: note = alpha-methyl-leucine
  SITE 16: note = L-ornithine
  SITE 17: note = Lysine is chemically modified through conjugation of the epsilon-amino group of the Lysine side chain with (gamma-Glu)2-CO-(CH2)16-CO2H
  SITE 20: note = 2-Aminoisobutyric Acid
  SITE 25: note = alpha-methyl-L-tyrosine
  SITE 43: note = Amidated residue
YXQGTFTSDFSXXLDXKAQXAFIEXLLEGGPSSGAPPPGGSEE

SEQ ID NO: 1056 - protein, 43 aa, synthetic construct; identical to SEQ ID NO: 1055
  SITE 2: note = 2-Aminoisobutyric Acid
  SITE 12: note = L-ornithine
  SITE 13: note = alpha-methyl-leucine
  SITE 16: note = L-ornithine
  SITE 17: note = Lysine is chemically modified through conjugation of the epsilon-amino group of the Lysine side chain with (gamma-Glu)2-CO-(CH2)16-CO2H
  SITE 20: note = 2-Aminoisobutyric Acid
  SITE 25: note = 3-(4-Pyridyl)-L-alanine
  SITE 43: note = Amidated residue

SEQ ID NO: 1057 - protein, 43 aa, synthetic construct
  SITE 2: note = 2-Aminoisobutyric Acid
  SITE 12: note = L-ornithine
  SITE 13: note = alpha-methyl-leucine
  SITE 17: note = Lysine is chemically modified through conjugation of the epsilon-amino group of the Lysine side chain with (gamma-Glu)2-CO-(CH2)16-CO2H
  SITE 20: note = 2-Aminoisobutyric Acid
  SITE 43: note = Amidated residue
YXQGTFTSDFSXXLDKKAQXAFIEYLLAGGPSSGAPPPEGSEE

SEQ ID NO: 1058 - protein, 43 aa, synthetic construct
  SITE 2: note = 2-Aminoisobutyric Acid
  SITE 12: note = L-ornithine
  SITE 13: note = alpha-methyl-leucine
  SITE 16: note = L-ornithine
  SITE 17: note = Lysine is chemically modified through conjugation of the epsilon-amino group of the Lysine side chain with (gamma-Glu)2-CO-(CH2)16-CO2H
  SITE 20: note = 2-Aminoisobutyric Acid
  SITE 43: note = Amidated residue
YXQGTFTSDFSXXLDXKAQXAFIEYLLAGGPSSGAPPPEGSEE

SEQ ID NO: 1059 - protein, 43 aa, synthetic construct
  SITE 2: note = 2-Aminoisobutyric Acid
  SITE 12: note = L-ornithine
  SITE 13: note = alpha-methyl-leucine
  SITE 16: note = L-ornithine
  SITE 17: note = Lysine is chemically modified through conjugation of the epsilon-amino group of the Lysine side chain with (gamma-Glu)2-CO-(CH2)16-CO2H
  SITE 20: note = 2-Aminoisobutyric Acid
  SITE 25: note = 3-(4-Pyridyl)-L-alanine
  SITE 43: note = Amidated residue
YXQGTFTSDFSXXLDXKAQXAFIEXLLAGGPSSGAPPPEGSEE

SEQ ID NO: 1060 - protein, 43 aa, synthetic construct
  SITE 2: note = 2-Aminoisobutyric Acid
  SITE 10: note = 3-(4-Pyridyl)-L-alanine
  SITE 12: note = (S)-2,4-diaminobutanoic acid
  SITE 13: note = alpha-methyl-leucine
  SITE 16: note = L-ornithine
  SITE 17: note = Lysine is chemically modified through conjugation of the epsilon-amino group of the Lysine side chain with (gamma-Glu)2-CO-(CH2)16-CO2H
  SITE 20: note = 2-Aminoisobutyric Acid
  SITE 25: note = 3-(4-Pyridyl)-L-alanine
  SITE 43: note = Amidated residue
YXQGTFTSDXSXXLDXKAQXAFIEXLLAGGPSSGAPPPEGSEE

SEQ ID NO: 1061 - protein, 43 aa, synthetic construct; identical to SEQ ID NO: 1060
  SITE 2: note = 2-Aminoisobutyric Acid
  SITE 10: note = 3-(4-Pyridyl)-L-alanine
  SITE 12: note = (S)-2,4-diaminobutanoic acid
  SITE 13: note = alpha-methyl-leucine
  SITE 16: note = L-ornithine
  SITE 17: note = Lysine is chemically modified through conjugation of the epsilon-amino group of the Lysine side chain with (gamma-Glu)2-CO-(CH2)16-CO2H
  SITE 20: note = 3-(4-Pyridyl)-L-alanine
  SITE 25: note = 3-(4-Pyridyl)-L-alanine
  SITE 43: note = Amidated residue

SEQ ID NO: 1062 - protein, 43 aa, synthetic construct
  SITE 2: note = 2-Aminoisobutyric Acid
  SITE 10: note = 3-(4-Pyridyl)-L-alanine
  SITE 13: note = alpha-methyl-leucine
  SITE 16: note = L-ornithine
  SITE 17: note = Lysine is chemically modified through conjugation of the epsilon-amino group of the Lysine side chain with (gamma-Glu)2-CO-(CH2)16-CO2H
  SITE 20: note = 3-(4-Pyridyl)-L-alanine
  SITE 43: note = Amidated residue
YXQGTFTSDXSQXLDXKAQXAFIEYLLAGGPSSGAPPPSGSEE

SEQ ID NO: 1063 - protein, 43 aa, synthetic construct; identical to SEQ ID NO: 1062
  SITE 2: note = 2-Aminoisobutyric Acid
  SITE 10: note = 3-(4-Pyridyl)-L-alanine
  SITE 13: note = alpha-methyl-leucine
  SITE 16: note = L-ornithine
  SITE 17: note = Lysine is chemically modified through conjugation of the epsilon-amino group of the Lysine side chain with (Glu)-(gamma-Glu)-CO-(CH2)16-CO2H
  SITE 20: note = 3-(4-Pyridyl)-L-alanine
  SITE 43: note = Amidated residue

SEQ ID NO: 1064 - protein, 43 aa, synthetic construct; identical to SEQ ID NO: 952
  SITE 2: note = 2-Aminoisobutyric Acid
  SITE 10: note = 3-(4-Pyridyl)-L-alanine
  SITE 13: note = alpha-methyl-leucine
  SITE 16: note = L-ornithine
  SITE 17: note = Lysine is chemically modified through conjugation of the epsilon-amino group of the Lysine side chain with D-Glutamic acid-(gamma-Glu)-CO-(CH2)16-CO2H
  SITE 20: note = 3-(4-Pyridyl)-L-alanine
  SITE 25: note = alpha-methyl-L-tyrosine
  SITE 43: note = Amidated residue

SEQ ID NO: 1065 - protein, 43 aa, synthetic construct
  SITE 2: note = 2-Aminoisobutyric Acid
  SITE 10: note = 3-(4-Pyridyl)-L-alanine
  SITE 12: note = L-ornithine
  SITE 13: note = alpha-methyl-leucine
  SITE 16: note = L-ornithine
  SITE 17: note = Lysine is chemically modified through conjugation of the epsilon-amino group of the Lysine side chain with (gamma-Glu)2-CO-(CH2)16-CO2H
  SITE 20: note = 3-(4-Pyridyl)-L-alanine
  SITE 43: note = Amidated residue
YXQGTFTSDXSXXLDXKAQXAFIEYLIAGGPSSGAPPPSGSEE

SEQ ID NO: 1066 - protein, 43 aa, synthetic construct; identical to SEQ ID NO: 967
  SITE 2: note = 2-Aminoisobutyric Acid
  SITE 10: note = 3-(4-Pyridyl)-L-alanine
  SITE 12: note = L-ornithine
  SITE 13: note = alpha-methyl-leucine
  SITE 17: note = Lysine is chemically modified through conjugation of the epsilon-amino group of the Lysine side chain with (Glu)-(gamma-Glu)-CO-(CH2)16-CO2H
  SITE 20: note = 3-(4-Pyridyl)-L-alanine
  SITE 43: note = Amidated residue

SEQ ID NO: 1067 - protein, 43 aa, synthetic construct; identical to SEQ ID NO: 1065
  SITE 2: note = 2-Aminoisobutyric Acid
  SITE 10: note = 3-(4-Pyridyl)-L-alanine
  SITE 12: note = L-ornithine
  SITE 13: note = alpha-methyl-leucine
  SITE 16: note = L-ornithine
  SITE 17: note = Lysine is chemically modified through conjugation of the epsilon-amino group of the Lysine side chain with (Glu)-(gamma-Glu)-CO-(CH2)16-CO2H
  SITE 20: note = 3-(4-Pyridyl)-L-alanine
  SITE 43: note = Amidated residue

SEQ ID NO: 1068 - protein, 43 aa, synthetic construct; identical to SEQ ID NO: 1065
  SITE 2: note = 2-Aminoisobutyric Acid
  SITE 10: note = 3-(4-Pyridyl)-L-alanine
  SITE 12: note = L-ornithine
  SITE 13: note = alpha-methyl-leucine
  SITE 16: note = L-ornithine
  SITE 17: note = Lysine is chemically modified through conjugation of the epsilon-amino group of the Lysine side chain with (Glu)2-(gamma-Glu)-CO-(CH2)16-CO2H
  SITE 20: note = 3-(4-Pyridyl)-L-alanine
  SITE 43: note = Amidated residue

SEQ ID NO: 1069 - protein, 43 aa, synthetic construct; identical to SEQ ID NO: 1065
  SITE 2: note = 2-Aminoisobutyric Acid
  SITE 10: note = 3-(4-Pyridyl)-L-alanine
  SITE 12: note = L-ornithine
  SITE 13: note = alpha-methyl-leucine
  SITE 16: note = L-ornithine
  SITE 17: note = Lysine is chemically modified through conjugation of the epsilon-amino group of the Lysine side chain with D-Glutamic acid-(gamma-Glu)-CO-(CH2)16-CO2H
  SITE 20: note = 3-(4-Pyridyl)-L-alanine
  SITE 43: note = Amidated residue

SEQ ID NO: 1070 - protein, 43 aa, synthetic construct
  SITE 2: note = 2-Aminoisobutyric Acid
  SITE 10: note = 3-(4-Pyridyl)-L-alanine
  SITE 12: note = L-ornithine
  SITE 13: note = alpha-methyl-leucine
  SITE 16: note = L-ornithine
  SITE 17: note = Lysine is chemically modified through conjugation of the epsilon-amino group of the Lysine side chain with (gamma-Glu)2-CO-(CH2)16-CO2H
  SITE 20: note = 2-Aminoisobutyric Acid
  SITE 25: note = alpha-methyl-L-tyrosine
  SITE 43: note = Amidated residue
YXQGTFTSDXSXXLDXKAQXAFIEXLLEGGPSSGAPPPSGSEE

SEQ ID NO: 1071 - protein, 43 aa, synthetic construct; identical to SEQ ID NO: 1070
  SITE 2: note = 2-Aminoisobutyric Acid
  SITE 10: note = 3-(4-Pyridyl)-L-alanine
  SITE 12: note = L-ornithine
  SITE 13: note = alpha-methyl-leucine
  SITE 16: note = L-ornithine
  SITE 17: note = Lysine is chemically modified through conjugation of the epsilon-amino group of the Lysine side chain with D-Glutamic acid-(gamma-Glu)-CO-(CH2)16-CO2H
  SITE 20: note = 2-Aminoisobutyric Acid
  SITE 25: note = alpha-methyl-L-tyrosine
  SITE 43: note = Amidated residue

SEQ ID NO: 1072 - protein, 43 aa, synthetic construct; identical to SEQ ID NO: 1070
  SITE 2: note = 2-Aminoisobutyric Acid
  SITE 10: note = 3-(4-Pyridyl)-L-alanine
  SITE 12: note = L-ornithine
  SITE 13: note = alpha-methyl-leucine
  SITE 16: note = L-ornithine
  SITE 17: note = Lysine is chemically modified through conjugation of the epsilon-amino group of the Lysine side chain with (Glu)-(gamma-Glu)-CO-(CH2)16-CO2H
  SITE 20: note = 2-Aminoisobutyric Acid
  SITE 25: note = alpha-methyl-L-tyrosine
  SITE 43: note = Amidated residue

SEQ ID NO: 1073 - protein, 43 aa, synthetic construct; identical to SEQ ID NO: 1070
  SITE 2: note = 2-Aminoisobutyric Acid
  SITE 10: note = 3-(4-Pyridyl)-L-alanine
  SITE 12: note = L-ornithine
  SITE 13: note = alpha-methyl-leucine
  SITE 16: note = L-ornithine
  SITE 17: note = Lysine is chemically modified through conjugation of the epsilon-amino group of the Lysine side chain with (Glu)2-(gamma-Glu)-CO-(CH2)16-CO2H
  SITE 20: note = 2-Aminoisobutyric Acid
  SITE 25: note = alpha-methyl-L-tyrosine
  SITE 43: note = Amidated residue

SEQ ID NO: 1074 - protein, 43 aa, synthetic construct
  SITE 2: note = 2-Aminoisobutyric Acid
  SITE 10: note = 3-(4-Pyridyl)-L-alanine
  SITE 12: note = L-ornithine
  SITE 13: note = alpha-methyl-leucine
  SITE 16: note = L-ornithine
  SITE 17: note = Lysine is chemically modified through conjugation of the epsilon-amino group of the Lysine side chain with (gamma-Glu)2-CO-(CH2)16-CO2H
  SITE 20: note = 3-(4-Pyridyl)-L-alanine
  SITE 43: note = Amidated residue
YXQGTFTSDXSXXLDXKAQXAFIEYLLAGGPSSGAPPPSGSEE

SEQ ID NO: 1075 - protein, 43 aa, synthetic construct; identical to SEQ ID NO: 1074
  SITE 2: note = 2-Aminoisobutyric Acid
  SITE 10: note = 3-(4-Pyridyl)-L-alanine
  SITE 12: note = L-ornithine
  SITE 13: note = alpha-methyl-leucine
  SITE 16: note = L-ornithine
  SITE 17: note = Lysine is chemically modified through conjugation of the epsilon-amino group of the Lysine side chain with (gamma-Glu)2-CO-(CH2)16-CO2H
  SITE 20: note = 2-Aminoisobutyric Acid
  SITE 43: note = Amidated residue

SEQ ID NO: 1076 - protein, 43 aa, synthetic construct; identical to SEQ ID NO: 1047
  SITE 2: note = 2-Aminoisobutyric Acid
  SITE 10: note = 3-(4-Pyridyl)-L-alanine
  SITE 13: note = alpha-methyl-leucine
  SITE 16: note = L-ornithine
  SITE 17: note = Lysine is chemically modified through conjugation of the epsilon-amino group of the Lysine side chain with D-Glutamic acid-(gamma-Glu)-CO-(CH2)16-CO2H
  SITE 20: note = 3-(4-Pyridyl)-L-alanine
  SITE 25: note = alpha-methyl-L-tyrosine
  SITE 43: note = Amidated residue

SEQ ID NO: 1077 - protein, 44 aa, synthetic construct
  SITE 2: note = 2-Aminoisobutyric Acid
  SITE 10: note = 3-(4-Pyridyl)-L-alanine
  SITE 13: note = alpha-methyl-leucine
  SITE 16: note = L-ornithine
  SITE 17: note = Lysine is chemically modified through conjugation of the epsilon-amino group of the Lysine side chain with D-Glutamic acid-(gamma-Glu)-CO-(CH2)16-CO2H
  SITE 20: note = 3-(4-Pyridyl)-L-alanine
  SITE 25: note = alpha-methyl-L-tyrosine
  SITE 44: note = Amidated residue
YXQGTFTSDXSQXLDXKAQXAFIEXLIEGGPSSGAPPPSGSEEE

SEQ ID NO: 1078 - protein, 43 aa, synthetic construct
  SITE 2: note = 2-Aminoisobutyric Acid
  SITE 10: note = 3-(4-Pyridyl)-L-alanine
  SITE 13: note = alpha-methyl-leucine
  SITE 16: note = L-ornithine
  SITE 17: note = Lysine is chemically modified through conjugation of the epsilon-amino group of the Lysine side chain with D-Glutamic acid-(gamma-Glu)-CO-(CH2)16-CO2H
  SITE 20: note = 3-(4-Pyridyl)-L-alanine
  SITE 25: note = alpha-methyl-L-tyrosine
  SITE 43: note = Amidated residue
YXQGTFTSDXSQXLDXKAQXAFIQXLIEGGPSSGAPPPSGSEE

SEQ ID NO: 1079 - protein, 44 aa, synthetic construct
  SITE 2: note = 2-Aminoisobutyric Acid
  SITE 10: note = 3-(4-Pyridyl)-L-alanine
  SITE 13: note = alpha-methyl-leucine
  SITE 16: note = L-ornithine
  SITE 17: note = Lysine is chemically modified through conjugation of the epsilon-amino group of the Lysine side chain with D-Glutamic acid-(gamma-Glu)-CO-(CH2)16-CO2H
  SITE 20: note = 3-(4-Pyridyl)-L-alanine
  SITE 25: note = alpha-methyl-L-tyrosine
  SITE 44: note = Amidated residue
YXQGTFTSDXSQXLDXKAQXAFIQXLIEGGPSSGAPPPSGSEEE

SEQ ID NO: 1080 - protein, 43 aa, synthetic construct
  SITE 2: note = 2-Aminoisobutyric Acid
  SITE 10: note = 3-(4-Pyridyl)-L-alanine
  SITE 13: note = alpha-methyl-leucine
  SITE 16: note = L-ornithine
  SITE 17: note = Lysine is chemically modified through conjugation of the epsilon-amino group of the Lysine side chain with D-Glutamic acid-(gamma-Glu)-CO-(CH2)16-CO2H
  SITE 20: note = 3-(4-Pyridyl)-L-alanine
  SITE 25: note = alpha-methyl-L-tyrosine
  SITE 43: note = Amidated residue
YXQGTFTSDXSQXLDXKAQXAFIEXLIAGGPSSGAPPPSGSEE

SEQ ID NO: 1081 - protein, 44 aa, synthetic construct
  SITE 2: note = 2-Aminoisobutyric Acid
  SITE 10: note = 3-(4-Pyridyl)-L-alanine
  SITE 13: note = alpha-methyl-leucine
  SITE 16: note = L-ornithine
  SITE 17: note = Lysine is chemically modified through conjugation of the epsilon-amino group of the Lysine side chain with D-Glutamic acid-(gamma-Glu)-CO-(CH2)16-CO2H
  SITE 20: note = 3-(4-Pyridyl)-L-alanine
  SITE 25: note = alpha-methyl-L-tyrosine
  SITE 44: note = Amidated residue
YXQGTFTSDXSQXLDXKAQXAFIEXLIAGGPSSGAPPPSGSEEE

SEQ ID NO: 1082 - protein, 44 aa, synthetic construct; identical to SEQ ID NO: 1079
  SITE 2: note = 2-Aminoisobutyric Acid
  SITE 10: note = 3-(4-Pyridyl)-L-alanine
  SITE 13: note = alpha-methyl-leucine
  SITE 16: note = L-ornithine
  SITE 17: note = Lysine is chemically modified through conjugation of the epsilon-amino group of the Lysine side chain with D-Glutamic acid-(gamma-Glu)-CO-(CH2)16-CO2H
  SITE 20: note = 3-(4-Pyridyl)-L-alanine
  SITE 25: note = alpha-methyl-L-tyrosine
  SITE 44: note = Amidated residue

SEQ ID NO: 1083 - protein, 44 aa, synthetic construct; identical to SEQ ID NO: 1079
  SITE 2: note = 2-Aminoisobutyric Acid
  SITE 10: note = 3-(4-Pyridyl)-L-alanine
  SITE 13: note = alpha-methyl-leucine
  SITE 16: note = L-ornithine
  SITE 17: note = Lysine is chemically modified through conjugation of the epsilon-amino group of the Lysine side chain with (Glu)-(gamma-Glu)-CO-(CH2)16-CO2H
  SITE 20: note = 3-(4-Pyridyl)-L-alanine
  SITE 25: note = alpha-methyl-L-tyrosine
  SITE 44: note = Amidated residue

SEQ ID NO: 1084 - protein, 45 aa, synthetic construct
  SITE 2: note = 2-Aminoisobutyric Acid
  SITE 10: note = 3-(4-Pyridyl)-L-alanine
  SITE 13: note = alpha-methyl-leucine
  SITE 16: note = L-ornithine
  SITE 18: note = Lysine is chemically modified through conjugation of the epsilon-amino group of the Lysine side chain with (Glu)2-(gamma-Glu)-CO-(CH2)16-CO2H
  SITE 21: note = 3-(4-Pyridyl)-L-alanine
  SITE 26: note = alpha-methyl-L-tyrosine
  SITE 45: note = Amidated residue
YXQGTFTSDXSQXLDXKKAQXAFIQXLIEGGPSSGAPPPSGSEEE

SEQ ID NO: 1085 - protein, 44 aa, synthetic construct; identical to SEQ ID NO: 1081
  SITE 2: note = 2-Aminoisobutyric Acid
  SITE 10: note = 3-(4-Pyridyl)-L-alanine
  SITE 13: note = alpha-methyl-leucine
  SITE 16: note = L-ornithine
  SITE 17: note = Lysine is chemically modified through conjugation of the epsilon-amino group of the Lysine side chain with (Glu)-(gamma-Glu)2-CO-(CH2)16-CO2H
  SITE 20: note = 3-(4-Pyridyl)-L-alanine
  SITE 25: note = alpha-methyl-L-tyrosine
  SITE 44: note = Amidated residue

SEQ ID NO: 1086 - protein, 44 aa, synthetic construct; identical to SEQ ID NO: 1081
  SITE 2: note = 2-Aminoisobutyric Acid
  SITE 10: note = 3-(4-Pyridyl)-L-alanine
  SITE 13: note = alpha-methyl-leucine
  SITE 16: note = L-ornithine
  SITE 17: note = Lysine is chemically modified through conjugation of the epsilon-amino group of the Lysine side chain with (Glu)2-(gamma-Glu)2-CO-(CH2)16-CO2H
  SITE 20: note = 3-(4-Pyridyl)-L-alanine
  SITE 25: note = alpha-methyl-L-tyrosine
  SITE 44: note = Amidated residue

SEQ ID NO: 1087 - protein, 44 aa, synthetic construct
  SITE 2: note = 2-Aminoisobutyric Acid
  SITE 10: note = 3-(4-Pyridyl)-L-alanine
  SITE 13: note = alpha-methyl-leucine
  SITE 16: note = L-ornithine
  SITE 17: note = Lysine is chemically modified through conjugation of the epsilon-amino group of the Lysine side chain with D-Glutamic acid-(gamma-Glu)-CO-(CH2)16-CO2H
  SITE 20: note = 3-(4-Pyridyl)-L-alanine
  SITE 25: note = alpha-methyl-L-tyrosine
  SITE 44: note = Amidated residue
YXQGTFTSDXSQXLDXKAQXQFIEXLIAGGPSSGAPPPSGSEEE

SEQ ID NO: 1088 - protein, 44 aa, synthetic construct
  SITE 2: note = 2-Aminoisobutyric Acid
  SITE 10: note = 3-(4-Pyridyl)-L-alanine
  SITE 13: note = alpha-methyl-leucine
  SITE 16: note = L-ornithine
  SITE 17: note = Lysine is chemically modified through conjugation of the epsilon-amino group of the Lysine side chain with D-Glutamic acid-(gamma-Glu)-CO-(CH2)16-CO2H
  SITE 20: note = 3-(4-Pyridyl)-L-alanine
  SITE 25: note = alpha-methyl-L-tyrosine
  SITE 44: note = Amidated residue
YXQGTFTSDXSQXLDXKAQXAFIEXLLAGGPSSGAPPPSGSEEE

SEQ ID NO: 1089 - protein, 44 aa, synthetic construct
  SITE 2: note = 2-Aminoisobutyric Acid
  SITE 10: note = 3-(4-Pyridyl)-L-alanine
  SITE 13: note = alpha-methyl-leucine
  SITE 16: note = L-ornithine
  SITE 17: note = Lysine is chemically modified through conjugation of the epsilon-amino group of the Lysine side chain with D-Glutamic acid-(gamma-Glu)-CO-(CH2)16-CO2H
  SITE 20: note = 3-(4-Pyridyl)-L-alanine
  SITE 25: note = alpha-methyl-L-tyrosine
  SITE 44: note = Amidated residue
YXQGTFTSDXSQXLDXKAQXAFIQXLLEGGPSSGAPPPSGSEEE

SEQ ID NO: 1090 - protein, 44 aa, synthetic construct
  SITE 2: note = 2-Aminoisobutyric Acid
  SITE 10: note = 3-(4-Pyridyl)-L-alanine
  SITE 13: note = alpha-methyl-leucine
  SITE 16: note = L-ornithine
  SITE 17: note = Lysine is chemically modified through conjugation of the epsilon-amino group of the Lysine side chain with D-Glutamic acid-(gamma-Glu)-CO-(CH2)16-CO2H
  SITE 20: note = 3-(4-Pyridyl)-L-alanine
  SITE 25: note = alpha-methyl-L-tyrosine
  SITE 44: note = Amidated residue
YXQGTFTSDXSQXLDXKAQXQFIEXLLAGGPSSGAPPPSGSEEE

SEQ ID NO: 1091 - protein, 41 aa, synthetic construct; identical to SEQ ID NO: 889
  SITE 2: note = 2-Aminoisobutyric Acid
  SITE 10: note = 3-(4-Pyridyl)-L-alanine
  SITE 13: note = alpha-methyl-leucine
  SITE 17: note = Lysine is chemically modified through conjugation of the epsilon-amino group of the Lysine side chain with D-Glutamic acid-(gamma-Glu)-CO-(CH2)16-CO2H
  SITE 20: note = 3-(4-Pyridyl)-L-alanine
  SITE 41: note = Amidated residue

SEQ ID NO: 1092 - protein, 41 aa, synthetic construct; identical to SEQ ID NO: 889
  SITE 2: note = 2-Aminoisobutyric Acid
  SITE 10: note = 3-(4-Pyridyl)-L-alanine
  SITE 13: note = alpha-methyl-leucine
  SITE 17: note = Lysine is chemically modified through conjugation of the epsilon-amino group of the Lysine side chain with (Glu)-(gamma-Glu)-CO-(CH2)16-CO2H
  SITE 20: note = 3-(4-Pyridyl)-L-alanine
  SITE 41: note = Amidated residue

SEQ ID NO: 1093 - protein, 41 aa, synthetic construct; identical to SEQ ID NO: 889
  SITE 2: note = 2-Aminoisobutyric Acid
  SITE 10: note = 3-(4-Pyridyl)-L-alanine
  SITE 13: note = alpha-methyl-leucine
  SITE 17: note = Lysine is chemically modified through conjugation of the epsilon-amino group of the Lysine side chain with (Glu)2-(gamma-Glu)-CO-(CH2)16-CO2H
  SITE 20: note = 3-(4-Pyridyl)-L-alanine
  SITE 41: note = Amidated residue

SEQ ID NO: 1094 - protein, 43 aa, synthetic construct
  SITE 2: note = 2-Aminoisobutyric Acid
  SITE 10: note = 3-(4-Pyridyl)-L-alanine
  SITE 13: note = alpha-methyl-leucine
  SITE 17: note = Lysine is chemically modified through conjugation of the epsilon-amino group of the Lysine side chain with D-Glutamic acid-(gamma-Glu)-CO-(CH2)16-CO2H
  SITE 20: note = 3-(4-Pyridyl)-L-alanine
  SITE 43: note = Amidated residue
YXQGTFTSDXSQXLDKKAQXAFIEYLIAGGPSSGAPPPSGEEE

SEQ ID NO: 1095 - protein, 43 aa, synthetic construct; identical to SEQ ID NO: 1094
  SITE 2: note = 2-Aminoisobutyric Acid
  SITE 10: note = 3-(4-Pyridyl)-L-alanine
  SITE 13: note = alpha-methyl-leucine
  SITE 17: note = Lysine is chemically modified through conjugation of the epsilon-amino group of the Lysine side chain with (Glu)-(gamma-Glu)-CO-(CH2)16-CO2H
  SITE 20: note = 3-(4-Pyridyl)-L-alanine
  SITE 43: note = Amidated residue

SEQ ID NO: 1096 - protein, 43 aa, synthetic construct; identical to SEQ ID NO: 1094
  SITE 2: note = 2-Aminoisobutyric Acid
  SITE 10: note = 3-(4-Pyridyl)-L-alanine
  SITE 13: note = alpha-methyl-leucine
  SITE 17: note = Lysine is chemically modified through conjugation of the epsilon-amino group of the Lysine side chain with (Glu)2-(gamma-Glu)-CO-(CH2)16-CO2H
  SITE 20: note = 3-(4-Pyridyl)-L-alanine
  SITE 43: note = Amidated residue

SEQ ID NO: 1097 - protein, 43 aa, synthetic construct
  SITE 2: note = 2-Aminoisobutyric Acid
  SITE 10: note = 3-(4-Pyridyl)-L-alanine
  SITE 13: note = alpha-methyl-leucine
  SITE 16: note = L-ornithine
  SITE 17: note = Lysine is chemically modified through conjugation of the epsilon-amino group of the Lysine side chain with (gamma-Glu)2-CO-(CH2)16-CO2H
  SITE 20: note = 3-(4-Pyridyl)-L-alanine
  SITE 29: note = 2-Aminoisobutyric Acid
  SITE 43: note = Amidated residue
YXQGTFTSDXSQXLDXKAQXAFIEYLIAXGPSSGAPPPSGSEE

SEQ ID NO: 1098 - protein, 43 aa, synthetic construct
  SITE 2: note = 2-Aminoisobutyric Acid
  SITE 10: note = 3-(4-Pyridyl)-L-alanine
  SITE 13: note = alpha-methyl-leucine
  SITE 16: note = L-ornithine
  SITE 17: note = Lysine is chemically modified through conjugation of the epsilon-amino group of the Lysine side chain with (gamma-Glu)2-CO-(CH2)16-CO2H
  SITE 20: note = 3-(4-Pyridyl)-L-alanine
  SITE 29: note = 2-Aminoisobutyric Acid
  SITE 43: note = Amidated residue
YXQGTFTSDXSQXLDXKAQXAFIEYLIAXGPSSGEPPPSGSEE

SEQ ID NO: 1099 - protein, 43 aa, synthetic construct
  SITE 2: note = 2-Aminoisobutyric Acid
  SITE 10: note = 3-(4-Pyridyl)-L-alanine
  SITE 13: note = alpha-methyl-leucine
  SITE 16: note = L-ornithine
  SITE 17: note = Lysine is chemically modified through conjugation of the epsilon-amino group of the Lysine side chain with (gamma-Glu)2-CO-(CH2)16-CO2H
  SITE 20: note = 3-(4-Pyridyl)-L-alanine
  SITE 25: note = alpha-methyl-L-tyrosine
  SITE 29: note = 2-Aminoisobutyric Acid
  SITE 43: note = Amidated residue
YXQGTFTSDXSQXLDXKAQXAFIEXLIEXGPSSGEPPPSGSEE

SEQ ID NO: 1100 - protein, 43 aa, synthetic construct
  SITE 2: note = 2-Aminoisobutyric Acid
  SITE 10: note = 3-(4-Pyridyl)-L-alanine
  SITE 13: note = alpha-methyl-leucine
  SITE 16: note = L-ornithine
  SITE 17: note = Lysine is chemically modified through conjugation of the epsilon-amino group of the Lysine side chain with (gamma-Glu)2-CO-(CH2)16-CO2H
  SITE 20: note = 3-(4-Pyridyl)-L-alanine
  SITE 25: note = alpha-methyl-L-tyrosine
  SITE 29: note = 2-Aminoisobutyric Acid
  SITE 43: note = Amidated residue
YXQGTFTSDXSQXLDXKAQXAFIEXLIAXGPSSGEPPPSGSEE

SEQ ID NO: 1101 - protein, 43 aa, synthetic construct; identical to SEQ ID NO: 1098
  SITE 2: note = 2-Aminoisobutyric Acid
  SITE 10: note = 3-(4-Pyridyl)-L-alanine
  SITE 13: note = alpha-methyl-leucine
  SITE 16: note = L-ornithine
  SITE 17: note = Lysine is chemically modified through conjugation of the epsilon-amino group of the Lysine side chain with (2-[2-(2-Amino-ethoxy)-ethoxy]-acetyl)-(gamma-Glu)-CO-(CH2) 16-CO2H
  SITE 20: note = 3-(4-Pyridyl)-L-alanine
  SITE 29: note = 2-Aminoisobutyric Acid
  SITE 43: note = Amidated residue

SEQ ID NO: 1102 - protein, 43 aa, synthetic construct
  SITE 2: note = 2-Aminoisobutyric Acid
  SITE 10: note = 3-(4-Pyridyl)-L-alanine
  SITE 13: note = alpha-methyl-leucine
  SITE 16: note = L-ornithine
  SITE 17: note = Lysine is chemically modified through conjugation of the epsilon-amino group of the Lysine side chain with (2-[2-(2-Amino-ethoxy)-ethoxy]-acetyl)-(gamma-Glu)-CO-(CH2) 16-CO2H
  SITE 20: note = 3-(4-Pyridyl)-L-alanine
  SITE 29: note = 2-Aminoisobutyric Acid
  SITE 43: note = Amidated residue
YXQGTFTSDXSQXLDXKAQXAFIEYLIQXGPSSGEPPPSGSEE

SEQ ID NO: 1103 - protein, 43 aa, synthetic construct; identical to SEQ ID NO: 1099
  SITE 2: note = 2-Aminoisobutyric Acid
  SITE 10: note = 3-(4-Pyridyl)-L-alanine
  SITE 13: note = alpha-methyl-leucine
  SITE 16: note = L-ornithine
  SITE 17: note = Lysine is chemically modified through conjugation of the epsilon-amino group of the Lysine side chain with (2-[2-(2-Amino-ethoxy)-ethoxy]-acetyl)-(gamma-Glu)-CO-(CH2) 16-CO2H
  SITE 20: note = 3-(4-Pyridyl)-L-alanine
  SITE 25: note = alpha-methyl-L-tyrosine
  SITE 29: note = 2-Aminoisobutyric Acid
  SITE 43: note = Amidated residue

SEQ ID NO: 1104 - protein, 43 aa, synthetic construct
  SITE 2: note = 2-Aminoisobutyric Acid
  SITE 10: note = 3-(4-Pyridyl)-L-alanine
  SITE 13: note = alpha-methyl-leucine
  SITE 16: note = L-ornithine
  SITE 17: note = Lysine is chemically modified through conjugation of the epsilon-amino group of the Lysine side chain with (2-[2-(2-Amino-ethoxy)-ethoxy]-acetyl)-(gamma-Glu)-CO-(CH2) 16-CO2H
  SITE 20: note = 3-(4-Pyridyl)-L-alanine
  SITE 25: note = alpha-methyl-L-tyrosine
  SITE 29: note = 2-Aminoisobutyric Acid
  SITE 43: note = Amidated residue
YXQGTFTSDXSQXLDXKAQXQFIEXLIEXGPSSGEPPPSGSEE

SEQ ID NO: 1105 - protein, 43 aa, synthetic construct; identical to SEQ ID NO: 1100
  SITE 2: note = 2-Aminoisobutyric Acid
  SITE 10: note = 3-(4-Pyridyl)-L-alanine
  SITE 13: note = alpha-methyl-leucine
  SITE 16: note = L-ornithine
  SITE 17: note = Lysine is chemically modified through conjugation of the epsilon-amino group of the Lysine side chain with (2-[2-(2-Amino-ethoxy)-ethoxy]-acetyl)-(gamma-Glu)-CO-(CH2) 16-CO2H
  SITE 20: note = 3-(4-Pyridyl)-L-alanine
  SITE 25: note = alpha-methyl-L-tyrosine
  SITE 29: note = 2-Aminoisobutyric Acid
  SITE 43: note = Amidated residue

SEQ ID NO: 1106 - protein, 43 aa, synthetic construct
  SITE 2: note = 2-Aminoisobutyric Acid
  SITE 10: note = 3-(4-Pyridyl)-L-alanine
  SITE 13: note = alpha-methyl-leucine
  SITE 16: note = L-ornithine
  SITE 17: note = Lysine is chemically modified through conjugation of the epsilon-amino group of the Lysine side chain with (2-[2-(2-Amino-ethoxy)-ethoxy]-acetyl)-(gamma-Glu)-CO-(CH2) 16-CO2H
  SITE 20: note = 3-(4-Pyridyl)-L-alanine
  SITE 25: note = alpha-methyl-L-tyrosine
  SITE 29: note = 2-Aminoisobutyric Acid
  SITE 43: note = Amidated residue
YXQGTFTSDXSQXLDXKAQXQFIEXLIAXGPSSGEPPPSGSEE

SEQ ID NO: 1107 - protein, 43 aa, synthetic construct; identical to SEQ ID NO: 1098
  SITE 2: note = 2-Aminoisobutyric Acid
  SITE 10: note = 3-(4-Pyridyl)-L-alanine
  SITE 13: note = alpha-methyl-leucine
  SITE 16: note = L-ornithine
  SITE 17: note = Lysine is chemically modified through conjugation of the epsilon-amino group of the Lysine side chain with D-Glutamic acid-(gamma-Glu)-CO-(CH2)16-CO2H
  SITE 20: note = 3-(4-Pyridyl)-L-alanine
  SITE 29: note = 2-Aminoisobutyric Acid
  SITE 43: note = Amidated residue

SEQ ID NO: 1108 - protein, 43 aa, synthetic construct; identical to SEQ ID NO: 1102
  SITE 2: note = 2-Aminoisobutyric Acid
  SITE 10: note = 3-(4-Pyridyl)-L-alanine
  SITE 13: note = alpha-methyl-leucine
  SITE 16: note = L-ornithine
  SITE 17: note = Lysine is chemically modified through conjugation of the epsilon-amino group of the Lysine side chain with D-Glutamic acid-(gamma-Glu)-CO-(CH2)16-CO2H
  SITE 20: note = 3-(4-Pyridyl)-L-alanine
  SITE 29: note = 2-Aminoisobutyric Acid
  SITE 43: note = Amidated residue

SEQ ID NO: 1109 - protein, 43 aa, synthetic construct; identical to SEQ ID NO: 1099
  SITE 2: note = 2-Aminoisobutyric Acid
  SITE 10: note = 3-(4-Pyridyl)-L-alanine
  SITE 13: note = alpha-methyl-leucine
  SITE 16: note = L-ornithine
  SITE 17: note = Lysine is chemically modified through conjugation of the epsilon-amino group of the Lysine side chain with D-Glutamic acid-(gamma-Glu)-CO-(CH2)16-CO2H
  SITE 20: note = 3-(4-Pyridyl)-L-alanine
  SITE 25: note = alpha-methyl-L-tyrosine
  SITE 29: note = 2-Aminoisobutyric Acid
  SITE 43: note = Amidated residue

SEQ ID NO: 1110 - protein, 43 aa, synthetic construct; identical to SEQ ID NO: 1104
  SITE 2: note = 2-Aminoisobutyric Acid
  SITE 10: note = 3-(4-Pyridyl)-L-alanine
  SITE 13: note = alpha-methyl-leucine
  SITE 16: note = L-ornithine
  SITE 17: note = Lysine is chemically modified through conjugation of the epsilon-amino group of the Lysine side chain with D-Glutamic acid-(gamma-Glu)-CO-(CH2)16-CO2H
  SITE 20: note = 3-(4-Pyridyl)-L-alanine
  SITE 25: note = alpha-methyl-L-tyrosine
  SITE 29: note = 2-Aminoisobutyric Acid
  SITE 43: note = Amidated residue

SEQ ID NO: 1111 - protein, 43 aa, synthetic construct; identical to SEQ ID NO: 1100
  SITE 2: note = 2-Aminoisobutyric Acid
  SITE 10: note = 3-(4-Pyridyl)-L-alanine
  SITE 13: note = alpha-methyl-leucine
  SITE 16: note = L-ornithine
  SITE 17: note = Lysine is chemically modified through conjugation of the epsilon-amino group of the Lysine side chain with D-Glutamic acid-(gamma-Glu)-CO-(CH2)16-CO2H
  SITE 20: note = 3-(4-Pyridyl)-L-alanine
  SITE 25: note = alpha-methyl-L-tyrosine
  SITE 29: note = 2-Aminoisobutyric Acid
  SITE 43: note = Amidated residue

SEQ ID NO: 1112 - protein, 43 aa, synthetic construct; identical to SEQ ID NO: 1106
  SITE 2: note = 2-Aminoisobutyric Acid
  SITE 10: note = 3-(4-Pyridyl)-L-alanine
  SITE 13: note = alpha-methyl-leucine
  SITE 16: note = L-ornithine
  SITE 17: note = Lysine is chemically modified through conjugation of the epsilon-amino group of the Lysine side chain with D-Glutamic acid-(gamma-Glu)-CO-(CH2)16-CO2H
  SITE 20: note = 3-(4-Pyridyl)-L-alanine
  SITE 25: note = alpha-methyl-L-tyrosine
  SITE 29: note = 2-Aminoisobutyric Acid
  SITE 43: note = Amidated residue

SEQ ID NO: 1113 - protein, 43 aa, synthetic construct
  SITE 2: note = 2-Aminoisobutyric Acid
  SITE 10: note = 3-(4-Pyridyl)-L-alanine
  SITE 13: note = alpha-methyl-leucine
  SITE 16: note = L-ornithine
  SITE 17: note = Lysine is chemically modified through conjugation of the epsilon-amino group of the Lysine side chain with (gamma-Glu)2-CO-(CH2)16-CO2H
  SITE 20: note = 3-(4-Pyridyl)-L-alanine
  SITE 25: note = alpha-methyl-L-tyrosine
  SITE 29: note = 2-Aminoisobutyric Acid
  SITE 43: note = Amidated residue
YXQGTFTSDXSQXLDXKAQXAFIEXLIAXGPSSGAPPPSGSEE

SEQ ID NO: 1114 - protein, 43 aa, synthetic construct
  SITE 2: note = 2-Aminoisobutyric Acid
  SITE 10: note = 3-(4-Pyridyl)-L-alanine
  SITE 13: note = alpha-methyl-leucine
  SITE 16: note = L-ornithine
  SITE 17: note = Lysine is chemically modified through conjugation of the epsilon-amino group of the Lysine side chain with (2-[2-(2-Amino-ethoxy)-ethoxy]-acetyl)-(gamma-Glu)-CO-(CH2) 16-CO2H
  SITE 20: note = 3-(4-Pyridyl)-L-alanine
  SITE 25: note = alpha-methyl-L-tyrosine
  SITE 29: note = 2-Aminoisobutyric Acid
  SITE 43: note = Amidated residue
YXQGTFTSDXSQXLDXKAQXAFIEXLIEXGPSSGAPPPSGSEE

SEQ ID NO: 1115 - protein, 43 aa, synthetic construct
  SITE 2: note = 2-Aminoisobutyric Acid
  SITE 10: note = 3-(4-Pyridyl)-L-alanine
  SITE 13: note = alpha-methyl-leucine
  SITE 16: note = L-ornithine
  SITE 17: note = Lysine is chemically modified through conjugation of the epsilon-amino group of the Lysine side chain with (2-[2-(2-Amino-ethoxy)-ethoxy]-acetyl)-(gamma-Glu)-CO-(CH2) 16-CO2H
  SITE 20: note = 3-(4-Pyridyl)-L-alanine
  SITE 25: note = alpha-methyl-L-tyrosine
  SITE 29: note = 2-Aminoisobutyric Acid
  SITE 43: note = Amidated residue
YXQGTFTSDXSQXLDXKAQXQFIEXLIEXGPSSGAPPPSGSEE

SEQ ID NO: 1116 - protein, 43 aa, synthetic construct; identical to SEQ ID NO: 1113
  SITE 2: note = 2-Aminoisobutyric Acid
  SITE 10: note = 3-(4-Pyridyl)-L-alanine
  SITE 13: note = alpha-methyl-leucine
  SITE 16: note = L-ornithine
  SITE 17: note = Lysine is chemically modified through conjugation of the epsilon-amino group of the Lysine side chain with (2-[2-(2-Amino-ethoxy)-ethoxy]-acetyl)-(gamma-Glu)-CO-(CH2) 16-CO2H
  SITE 20: note = 3-(4-Pyridyl)-L-alanine
  SITE 25: note = alpha-methyl-L-tyrosine
  SITE 29: note = 2-Aminoisobutyric Acid
  SITE 43: note = Amidated residue

SEQ ID NO: 1117 - protein, 43 aa, synthetic construct
  SITE 2: note = 2-Aminoisobutyric Acid
  SITE 10: note = 3-(4-Pyridyl)-L-alanine
  SITE 13: note = alpha-methyl-leucine
  SITE 16: note = L-ornithine
  SITE 17: note = Lysine is chemically modified through conjugation of the epsilon-amino group of the Lysine side chain with (2-[2-(2-Amino-ethoxy)-ethoxy]-acetyl)-(gamma-Glu)-CO-(CH2) 16-CO2H
  SITE 20: note = 3-(4-Pyridyl)-L-alanine
  SITE 25: note = alpha-methyl-L-tyrosine
  SITE 29: note = 2-Aminoisobutyric Acid
  SITE 43: note = Amidated residue
YXQGTFTSDXSQXLDXKAQXQFIEXLIAXGPSSGAPPPSGSEE

SEQ ID NO: 1118 - protein, 43 aa, synthetic construct; identical to SEQ ID NO: 1114
  SITE 2: note = 2-Aminoisobutyric Acid
  SITE 10: note = 3-(4-Pyridyl)-L-alanine
  SITE 13: note = alpha-methyl-leucine
  SITE 16: note = L-ornithine
  SITE 17: note = Lysine is chemically modified through conjugation of the epsilon-amino group of the Lysine side chain with D-Glutamic acid-(gamma-Glu)-CO-(CH2)16-CO2H
  SITE 20: note = 3-(4-Pyridyl)-L-alanine
  SITE 25: note = alpha-methyl-L-tyrosine
  SITE 29: note = 2-Aminoisobutyric Acid
  SITE 43: note = Amidated residue

SEQ ID NO: 1119 - protein, 43 aa, synthetic construct; identical to SEQ ID NO: 1115
  SITE 2: note = 2-Aminoisobutyric Acid
  SITE 10: note = 3-(4-Pyridyl)-L-alanine
  SITE 13: note = alpha-methyl-leucine
  SITE 16: note = L-ornithine
  SITE 17: note = Lysine is chemically modified through conjugation of the epsilon-amino group of the Lysine side chain with D-Glutamic acid-(gamma-Glu)-CO-(CH2)16-CO2H
  SITE 20: note = 3-(4-Pyridyl)-L-alanine
  SITE 25: note = alpha-methyl-L-tyrosine
  SITE 29: note = 2-Aminoisobutyric Acid
  SITE 43: note = Amidated residue

SEQ ID NO: 1120 - protein, 43 aa, synthetic construct; identical to SEQ ID NO: 1113
  SITE 2: note = 2-Aminoisobutyric Acid
  SITE 10: note = 3-(4-Pyridyl)-L-alanine
  SITE 13: note = alpha-methyl-leucine
  SITE 16: note = L-ornithine
  SITE 17: note = Lysine is chemically modified through conjugation of the epsilon-amino group of the Lysine side chain with D-Glutamic acid-(gamma-Glu)-CO-(CH2)16-CO2H
  SITE 20: note = 3-(4-Pyridyl)-L-alanine
  SITE 25: note = alpha-methyl-L-tyrosine
  SITE 29: note = 2-Aminoisobutyric Acid
  SITE 43: note = Amidated residue

SEQ ID NO: 1121 - protein, 43 aa, synthetic construct; identical to SEQ ID NO: 1117
  SITE 2: note = 2-Aminoisobutyric Acid
  SITE 10: note = 3-(4-Pyridyl)-L-alanine
  SITE 13: note = alpha-methyl-leucine
  SITE 16: note = L-ornithine
  SITE 17: note = Lysine is chemically modified through conjugation of the epsilon-amino group of the Lysine side chain with D-Glutamic acid-(gamma-Glu)-CO-(CH2)16-CO2H
  SITE 20: note = 3-(4-Pyridyl)-L-alanine
  SITE 25: note = alpha-methyl-L-tyrosine
  SITE 29: note = 2-Aminoisobutyric Acid
  SITE 43: note = Amidated residue

SEQ ID NO: 1122 - protein, 42 aa, synthetic construct
  SITE 2: note = 2-Aminoisobutyric Acid
  SITE 10: note = 3-(4-Pyridyl)-L-alanine
  SITE 13: note = alpha-methyl-leucine
  SITE 17: note = Lysine is chemically modified through conjugation of the epsilon-amino group of the Lysine side chain with (2-[2-(2-Amino-ethoxy)-ethoxy]-acetyl)-(gamma-Glu)-CO-(CH2) 16-CO2H
  SITE 20: note = 3-(4-Pyridyl)-L-alanine
  SITE 25: note = 3-(4-Pyridyl)-L-alanine
  SITE 29: note = 2-Aminoisobutyric Acid
  SITE 42: note = Amidated residue
YXQGTFTSDXSQXLDKKAQXAFIEXLIEXGPSSGAPPPSGTE

SEQ ID NO: 1123 - protein, 43 aa, synthetic construct
  SITE 2: note = 2-Aminoisobutyric Acid
  SITE 10: note = 3-(4-Pyridyl)-L-alanine
  SITE 13: note = alpha-methyl-leucine
  SITE 17: note = Lysine is chemically modified through conjugation of the epsilon-amino group of the Lysine side chain with (2-[2-(2-Amino-ethoxy)-ethoxy]-acetyl)-(gamma-Glu)-CO-(CH2) 16-CO2H
  SITE 20: note = 3-(4-Pyridyl)-L-alanine
  SITE 25: note = 3-(4-Pyridyl)-L-alanine
  SITE 29: note = 2-Aminoisobutyric Acid
  SITE 43: note = Amidated residue
YXQGTFTSDXSQXLDKKAQXAFIEXLIEXGPSSGAPPPSGTGE

SEQ ID NO: 1124 - protein, 42 aa, synthetic construct; identical to SEQ ID NO: 1122
  SITE 2: note = 2-Aminoisobutyric Acid
  SITE 10: note = 3-(4-Pyridyl)-L-alanine
  SITE 13: note = alpha-methyl-leucine
  SITE 17: note = Lysine is chemically modified through conjugation of the epsilon-amino group of the Lysine side chain with (gamma-Glu)2-CO-(CH2)16-CO2H
  SITE 20: note = 3-(4-Pyridyl)-L-alanine
  SITE 25: note = 3-(4-Pyridyl)-L-alanine
  SITE 29: note = 2-Aminoisobutyric Acid
  SITE 42: note = Amidated residue

SEQ ID NO: 1125 - protein, 43 aa, synthetic construct; identical to SEQ ID NO: 1123
  SITE 2: note = 2-Aminoisobutyric Acid
  SITE 10: note = 3-(4-Pyridyl)-L-alanine
  SITE 13: note = alpha-methyl-leucine
  SITE 17: note = Lysine is chemically modified through conjugation of the epsilon-amino group of the Lysine side chain with (gamma-Glu)2-CO-(CH2)16-CO2H
  SITE 20: note = 3-(4-Pyridyl)-L-alanine
  SITE 25: note = 3-(4-Pyridyl)-L-alanine
  SITE 29: note = 2-Aminoisobutyric Acid
  SITE 43: note = Amidated residue

SEQ ID NO: 1126 - protein, 41 aa, synthetic construct
  SITE 2: note = 2-Aminoisobutyric Acid
  SITE 10: note = 3-(4-Pyridyl)-L-alanine
  SITE 13: note = alpha-methyl-leucine
  SITE 17: note = Lysine is chemically modified through conjugation of the epsilon-amino group of the Lysine side chain with (gamma-Glu)2-CO-(CH2)16-CO2H
  SITE 20: note = 3-(4-Pyridyl)-L-alanine
  SITE 25: note = 3-(4-Pyridyl)-L-alanine
  SITE 29: note = 2-Aminoisobutyric Acid
  SITE 41: note = Amidated residue
YXQGTFTSDXSQXLDKKAQXAFIEXLIEXGPSSGAPPPSGE

SEQ ID NO: 1127 - protein, 42 aa, synthetic construct
  SITE 2: note = 2-Aminoisobutyric Acid
  SITE 10: note = 3-(4-Pyridyl)-L-alanine
  SITE 13: note = alpha-methyl-leucine
  SITE 17: note = Lysine is chemically modified through conjugation of the epsilon-amino group of the Lysine side chain with (gamma-Glu)2-CO-(CH2)16-CO2H
  SITE 20: note = 3-(4-Pyridyl)-L-alanine
  SITE 25: note = 3-(4-Pyridyl)-L-alanine
  SITE 29: note = 2-Aminoisobutyric Acid
  SITE 42: note = Amidated residue
YXQGTFTSDXSQXLDKKAQXAFIEXLIEXGPSSGAPPPSGEE

SEQ ID NO: 1128 - protein, 43 aa, synthetic construct
  SITE 2: note = 2-Aminoisobutyric Acid
  SITE 10: note = 3-(4-Pyridyl)-L-alanine
  SITE 13: note = alpha-methyl-leucine
  SITE 17: note = Lysine is chemically modified through conjugation of the epsilon-amino group of the Lysine side chain with (gamma-Glu)2-CO-(CH2)16-CO2H
  SITE 20: note = 3-(4-Pyridyl)-L-alanine
  SITE 25: note = 3-(4-Pyridyl)-L-alanine
  SITE 29: note = 2-Aminoisobutyric Acid
  SITE 43: note = Amidated residue
YXQGTFTSDXSQXLDKKAQXAFIEXLIEXGPSSGAPPPSGSEE

SEQ ID NO: 1129 - protein, 41 aa, synthetic construct
  SITE 2: note = 2-Aminoisobutyric Acid
  SITE 10: note = 3-(4-Pyridyl)-L-alanine
  SITE 13: note = alpha-methyl-leucine
  SITE 17: note = Lysine is chemically modified through conjugation of the epsilon-amino group of the Lysine side chain with (gamma-Glu)2-CO-(CH2)16-CO2H
  SITE 20: note = 3-(4-Pyridyl)-L-alanine
  SITE 25: note = 3-(4-Pyridyl)-L-alanine
  SITE 29: note = 2-Aminoisobutyric Acid
  SITE 41: note = Amidated residue
YXQGTFTSDXSQXLDKKAQXAFIEXLIEXGPSSGEPPPSGE

SEQ ID NO: 1130 - protein, 43 aa, synthetic construct
  SITE 2: note = 2-Aminoisobutyric Acid
  SITE 10: note = 3-(4-Pyridyl)-L-alanine
  SITE 13: note = alpha-methyl-leucine
  SITE 17: note = Lysine is chemically modified through conjugation of the epsilon-amino group of the Lysine side chain with (gamma-Glu)2-CO-(CH2)16-CO2H
  SITE 20: note = 3-(4-Pyridyl)-L-alanine
  SITE 25: note = 3-(4-Pyridyl)-L-alanine
  SITE 29: note = 2-Aminoisobutyric Acid
  SITE 43: note = Amidated residue
YXQGTFTSDXSQXLDKKAQXAFIEXLIEXGPSSGEPPPSGEEE

SEQ ID NO: 1131 - protein, 43 aa, synthetic construct
  SITE 2: note = 2-Aminoisobutyric Acid
  SITE 10: note = 3-(4-Pyridyl)-L-alanine
  SITE 13: note = alpha-methyl-leucine
  SITE 17: note = Lysine is chemically modified through conjugation of the epsilon-amino group of the Lysine side chain with (gamma-Glu)2-CO-(CH2)16-CO2H
  SITE 20: note = 3-(4-Pyridyl)-L-alanine
  SITE 25: note = 3-(4-Pyridyl)-L-alanine
  SITE 29: note = 2-Aminoisobutyric Acid
  SITE 43: note = Amidated residue
YXQGTFTSDXSQXLDKKAQXAFIEXLIEXGPSSGEPPPSGSEE

SEQ ID NO: 1132 - protein, 42 aa, synthetic construct
  SITE 2: note = 2-Aminoisobutyric Acid
  SITE 10: note = 3-(4-Pyridyl)-L-alanine
  SITE 13: note = alpha-methyl-leucine
  SITE 17: note = Lysine is chemically modified through conjugation of the epsilon-amino group of the Lysine side chain with (gamma-Glu)2-CO-(CH2)16-CO2H
  SITE 20: note = 3-(4-Pyridyl)-L-alanine
  SITE 29: note = 2-Aminoisobutyric Acid
  SITE 42: note = Amidated residue
YXQGTFTSDXSQXLDKKAQXAFIEYLIEXGPSSGAPPPSGTE

SEQ ID NO: 1133 - protein, 43 aa, synthetic construct
  SITE 2: note = 2-Aminoisobutyric Acid
  SITE 10: note = 3-(4-Pyridyl)-L-alanine
  SITE 13: note = alpha-methyl-leucine
  SITE 17: note = Lysine is chemically modified through conjugation of the epsilon-amino group of the Lysine side chain with (gamma-Glu)2-CO-(CH2)16-CO2H
  SITE 20: note = 3-(4-Pyridyl)-L-alanine
  SITE 29: note = 2-Aminoisobutyric Acid
  SITE 43: note = Amidated residue
YXQGTFTSDXSQXLDKKAQXAFIEYLIEXGPSSGAPPPSGTGE

SEQ ID NO: 1134 - protein, 43 aa, synthetic construct
  SITE 2: note = 2-Aminoisobutyric Acid
  SITE 10: note = 3-(4-Pyridyl)-L-alanine
  SITE 13: note = alpha-methyl-leucine
  SITE 16: note = L-ornithine
  SITE 17: note = Lysine is chemically modified through conjugation of the epsilon-amino group of the Lysine side chain with D-Glutamic acid-(gamma-Glu)-CO-(CH2)16-CO2H
  SITE 20: note = 3-(4-Pyridyl)-L-alanine
  SITE 25: note = alpha-methyl-L-tyrosine
  SITE 29: note = 2-Aminoisobutyric Acid
  SITE 43: note = Amidated residue
YXQGTFTSDXSQXLDXKAQXQFIQXLIAXGPSSGEPPPSGGGE

SEQ ID NO: 1135 - protein, 43 aa, synthetic construct
  SITE 2: note = 2-Aminoisobutyric Acid
  SITE 10: note = 3-(4-Pyridyl)-L-alanine
  SITE 13: note = alpha-methyl-leucine
  SITE 16: note = L-ornithine
  SITE 17: note = Lysine is chemically modified through conjugation of the epsilon-amino group of the Lysine side chain with D-Glutamic acid-(gamma-Glu)-CO-(CH2)16-CO2H
  SITE 20: note = 3-(4-Pyridyl)-L-alanine
  SITE 25: note = alpha-methyl-L-tyrosine
  SITE 29: note = 2-Aminoisobutyric Acid
  SITE 43: note = Amidated residue
YXQGTFTSDXSQXLDXKAQXQFIQXLIEXGPSSGEPPPSGGGE

SEQ ID NO: 1136 - protein, 43 aa, synthetic construct
  SITE 2: note = 2-Aminoisobutyric Acid
  SITE 10: note = 3-(4-Pyridyl)-L-alanine
  SITE 13: note = alpha-methyl-leucine
  SITE 16: note = L-ornithine
  SITE 17: note = Lysine is chemically modified through conjugation of the epsilon-amino group of the Lysine side chain with D-Glutamic acid-(gamma-Glu)-CO-(CH2)16-CO2H
  SITE 20: note = 3-(4-Pyridyl)-L-alanine
  SITE 25: note = alpha-methyl-L-tyrosine
  SITE 29: note = 2-Aminoisobutyric Acid
  SITE 43: note = Amidated residue
YXQGTFTSDXSQXLDXKAQXAFIQXLIAXGPSSGEPPPSGGGE

SEQ ID NO: 1137 - protein, 43 aa, synthetic construct
  SITE 2: note = 2-Aminoisobutyric Acid
  SITE 10: note = 3-(4-Pyridyl)-L-alanine
  SITE 13: note = alpha-methyl-leucine
  SITE 16: note = L-ornithine
  SITE 17: note = Lysine is chemically modified through conjugation of the epsilon-amino group of the Lysine side chain with D-Glutamic acid-(gamma-Glu)-CO-(CH2)16-CO2H
  SITE 20: note = 3-(4-Pyridyl)-L-alanine
  SITE 25: note = alpha-methyl-L-tyrosine
  SITE 29: note = 2-Aminoisobutyric Acid
  SITE 43: note = Amidated residue
YXQGTFTSDXSQXLDXKAQXAFIQXLIEXGPSSGEPPPSGGGE

SEQ ID NO: 1138 - protein, 43 aa, synthetic construct
  SITE 2: note = 2-Aminoisobutyric Acid
  SITE 10: note = 3-(4-Pyridyl)-L-alanine
  SITE 11: note = alpha-methyl-L-serine
  SITE 13: note = alpha-methyl-leucine
  SITE 16: note = L-ornithine
  SITE 17: note = Lysine is chemically modified through conjugation of the epsilon-amino group of the Lysine side chain with D-Glutamic acid-(gamma-Glu)-CO-(CH2)16-CO2H
  SITE 20: note = 3-(4-Pyridyl)-L-alanine
  SITE 25: note = alpha-methyl-L-tyrosine
  SITE 29: note = 2-Aminoisobutyric Acid
  SITE 43: note = Amidated residue
YXQGTFTSDXXQXLDXKAQXQFIQXLIAXGPSSGAPPPSGGGE

SEQ ID NO: 1139 - protein, 43 aa, synthetic construct
  SITE 2: note = 2-Aminoisobutyric Acid
  SITE 10: note = 3-(4-Pyridyl)-L-alanine
  SITE 11: note = alpha-methyl-L-serine
  SITE 13: note = alpha-methyl-leucine
  SITE 16: note = L-ornithine
  SITE 17: note = Lysine is chemically modified through conjugation of the epsilon-amino group of the Lysine side chain with D-Glutamic acid-(gamma-Glu)-CO-(CH2)16-CO2H
  SITE 20: note = 3-(4-Pyridyl)-L-alanine
  SITE 25: note = alpha-methyl-L-tyrosine
  SITE 43: note = Amidated residue
YXQGTFTSDXXQXLDXKAQXQFIQXLIAGGPSSGEPPPSGGGE

SEQ ID NO: 1140 - protein, 43 aa, synthetic construct
  SITE 1: note = N-methyl-tyrosine
  SITE 2: note = 2-Aminoisobutyric Acid
  SITE 10: note = 3-(4-Pyridyl)-L-alanine
  SITE 11: note = alpha-methyl-L-serine
  SITE 13: note = alpha-methyl-leucine
  SITE 16: note = L-ornithine
  SITE 17: note = Lysine is chemically modified through conjugation of the epsilon-amino group of the Lysine side chain with D-Glutamic acid-(gamma-Glu)-CO-(CH2)16-CO2H
  SITE 20: note = 3-(4-Pyridyl)-L-alanine
  SITE 25: note = alpha-methyl-L-tyrosine
  SITE 29: note = 2-Aminoisobutyric Acid
  SITE 43: note = Amidated residue
YXQGTFTSDXXQXLDXKAQXQFIQXLIEXGPSSGAPPPSGGGE

SEQ ID NO: 1141 - protein, 43 aa, synthetic construct
  SITE 1: note = N-methyl-tyrosine
  SITE 2: note = 2-Aminoisobutyric Acid
  SITE 10: note = 3-(4-Pyridyl)-L-alanine
  SITE 11: note = alpha-methyl-L-serine
  SITE 13: note = alpha-methyl-leucine
  SITE 16: note = L-ornithine
  SITE 17: note = Lysine is chemically modified through conjugation of the epsilon-amino group of the Lysine side chain with D-Glutamic acid-(gamma-Glu)-CO-(CH2)16-CO2H
  SITE 20: note = 3-(4-Pyridyl)-L-alanine
  SITE 25: note = alpha-methyl-L-tyrosine
  SITE 29: note = 2-Aminoisobutyric Acid
  SITE 43: note = Amidated residue
YXQGTFTSDXXIXLDXKAQXQFIQXLIEXGPSSGAPPPSGGGE

SEQ ID NO: 1142 - protein, 43 aa, synthetic construct; identical to SEQ ID NO: 1141
  SITE 2: note = 2-Aminoisobutyric Acid
  SITE 10: note = 3-(4-Pyridyl)-L-alanine
  SITE 11: note = alpha-methyl-L-serine
  SITE 13: note = alpha-methyl-leucine
  SITE 16: note = L-ornithine
  SITE 17: note = Lysine is chemically modified through conjugation of the epsilon-amino group of the Lysine side chain with D-Glutamic acid-(gamma-Glu)-CO-(CH2)16-CO2H
  SITE 20: note = 3-(4-Pyridyl)-L-alanine
  SITE 25: note = alpha-methyl-L-tyrosine
  SITE 29: note = 2-Aminoisobutyric Acid
  SITE 43: note = Amidated residue

SEQ ID NO: 1143 - protein, 43 aa, synthetic construct; identical to SEQ ID NO: 1140
  SITE 2: note = 2-Aminoisobutyric Acid
  SITE 10: note = 3-(4-Pyridyl)-L-alanine
  SITE 11: note = alpha-methyl-L-serine
  SITE 13: note = alpha-methyl-leucine
  SITE 16: note = L-ornithine
  SITE 17: note = Lysine is chemically modified through conjugation of the epsilon-amino group of the Lysine side chain with D-Glutamic acid-(gamma-Glu)-CO-(CH2)16-CO2H
  SITE 20: note = L-isovaline
  SITE 25: note = alpha-methyl-L-tyrosine
  SITE 29: note = 2-Aminoisobutyric Acid
  SITE 43: note = Amidated residue

SEQ ID NO: 1144 - protein, 43 aa, synthetic construct
  SITE 2: note = 2-Aminoisobutyric Acid
  SITE 10: note = 3-(4-Pyridyl)-L-alanine
  SITE 11: note = alpha-methyl-L-serine
  SITE 13: note = alpha-methyl-leucine
  SITE 16: note = L-ornithine
  SITE 17: note = Lysine is chemically modified through conjugation of the epsilon-amino group of the Lysine side chain with D-Glutamic acid-(gamma-Glu)-CO-(CH2)16-CO2H
  SITE 20: note = 3-(4-Pyridyl)-L-alanine
  SITE 25: note = alpha-methyl-L-tyrosine
  SITE 29: note = 2-Aminoisobutyric Acid
  SITE 43: note = Amidated residue
YXQGTFTSDXXQXLDXKAQXQFIQXLLEXGPSSGAPPPSGGGE

SEQ ID NO: 1145 - protein, 43 aa, synthetic construct; identical to SEQ ID NO: 1144
  SITE 2: note = 2-Aminoisobutyric Acid
  SITE 10: note = 3-(4-Pyridyl)-L-alanine
  SITE 11: note = alpha-methyl-L-serine
  SITE 13: note = alpha-methyl-leucine
  SITE 16: note = L-ornithine
  SITE 17: note = Lysine is chemically modified through conjugation of the epsilon-amino group of the Lysine side chain with D-Glutamic acid-(gamma-Glu)-CO-(CH2)16-CO2H
  SITE 20: note = L-isovaline
  SITE 25: note = alpha-methyl-L-tyrosine
  SITE 29: note = 2-Aminoisobutyric Acid
  SITE 43: note = Amidated residue

SEQ ID NO: 1146 - protein, 41 aa, synthetic construct
  SITE 2: note = 2-Aminoisobutyric Acid
  SITE 6: note = alpha-methyl-2-fluoro-L-phenylalanine
  SITE 10: note = 3-(4-Pyridyl)-L-alanine
  SITE 11: note = alpha-methyl-L-serine
  SITE 13: note = alpha-methyl-leucine
  SITE 16: note = L-ornithine
  SITE 17: note = Lysine is chemically modified through conjugation of the epsilon-amino group of the Lysine side chain with (2-[2-(2-Amino-ethoxy)-ethoxy]-acetyl)-(gamma-Glu)-CO-(CH2) 16-CO2H
  SITE 20: note = 3-(4-Pyridyl)-L-alanine
  SITE 24: note = D-amino acid
  SITE 25: note = alpha-methyl-L-tyrosine
  SITE 41: note = Amidated residue
YXQGTXTSDXXIXLDXKAQXEFIEXLIEGGPSSGAPPPSGE

SEQ ID NO: 1147 - protein, 41 aa, synthetic construct
  SITE 2: note = 2-Aminoisobutyric Acid
  SITE 6: note = alpha-methyl-2-fluoro-L-phenylalanine
  SITE 10: note = 3-(4-Pyridyl)-L-alanine
  SITE 11: note = alpha-methyl-L-serine
  SITE 13: note = alpha-methyl-leucine
  SITE 16: note = L-ornithine
  SITE 17: note = Lysine is chemically modified through conjugation of the epsilon-amino group of the Lysine side chain with (2-[2-(2-Amino-ethoxy)-ethoxy]-acetyl)-(gamma-Glu)-CO-(CH2) 16-CO2H
  SITE 20: note = 3-(4-Pyridyl)-L-alanine
  SITE 24: note = D-amino acid
  SITE 25: note = alpha-methyl-L-tyrosine
  SITE 41: note = Amidated residue
YXQGTXTSDXXIXLDXKAQXEFIEXLIEGGPSSGEPPPSGE

SEQ ID NO: 1148 - protein, 41 aa, synthetic construct
  SITE 2: note = 2-Aminoisobutyric Acid
  SITE 6: note = alpha-methyl-2-fluoro-L-phenylalanine
  SITE 10: note = 3-(4-Pyridyl)-L-alanine
  SITE 11: note = alpha-methyl-L-serine
  SITE 13: note = alpha-methyl-leucine
  SITE 16: note = L-ornithine
  SITE 17: note = Lysine is chemically modified through conjugation of the epsilon-amino group of the Lysine side chain with (2-[2-(2-Amino-ethoxy)-ethoxy]-acetyl)-(gamma-Glu)-CO-(CH2) 16-CO2H
  SITE 20: note = 3-(4-Pyridyl)-L-alanine
  SITE 24: note = D-amino acid
  SITE 25: note = alpha-methyl-L-tyrosine
  SITE 41: note = Amidated residue
YXQGTXTSDXXIXLDXKAQXEFIEXLIEGGPSSGAPPPTGE

SEQ ID NO: 1149 - protein, 41 aa, synthetic construct
  SITE 2: note = 2-Aminoisobutyric Acid
  SITE 6: note = alpha-methyl-2-fluoro-L-phenylalanine
  SITE 10: note = 3-(4-Pyridyl)-L-alanine
  SITE 11: note = alpha-methyl-L-serine
  SITE 13: note = alpha-methyl-leucine
  SITE 16: note = L-ornithine
  SITE 17: note = Lysine is chemically modified through conjugation of the epsilon-amino group of the Lysine side chain with (2-[2-(2-Amino-ethoxy)-ethoxy]-acetyl)-(gamma-Glu)-CO-(CH2) 16-CO2H
  SITE 20: note = 3-(4-Pyridyl)-L-alanine
  SITE 24: note = D-amino acid
  SITE 25: note = alpha-methyl-L-tyrosine
  SITE 41: note = Amidated residue
YXQGTXTSDXXIXLDXKAQXEFIEXLIEGGPSSGEPPPTGE

SEQ ID NO: 1150 - protein, 41 aa, synthetic construct
  SITE 2: note = 2-Aminoisobutyric Acid
  SITE 6: note = alpha-methyl-2-fluoro-L-phenylalanine
  SITE 10: note = 3-(4-Pyridyl)-L-alanine
  SITE 11: note = alpha-methyl-L-serine
  SITE 13: note = alpha-methyl-leucine
  SITE 16: note = L-ornithine
  SITE 17: note = Lysine is chemically modified through conjugation of the epsilon-amino group of the Lysine side chain with (2-[2-(2-Amino-ethoxy)-ethoxy]-acetyl)-(gamma-Glu)-CO-(CH2) 16-CO2H
  SITE 20: note = 3-(4-Pyridyl)-L-alanine
  SITE 24: note = D-amino acid
  SITE 25: note = alpha-methyl-L-tyrosine
  SITE 41: note = Amidated residue
YXQGTXTSDXXIXLDXKAQXEFIEXLIEGGPSSGAPPPGGE

SEQ ID NO: 1151 - protein, 41 aa, synthetic construct
  SITE 2: note = 2-Aminoisobutyric Acid
  SITE 6: note = alpha-methyl-2-fluoro-L-phenylalanine
  SITE 10: note = 3-(4-Pyridyl)-L-alanine
  SITE 11: note = alpha-methyl-L-serine
  SITE 13: note = alpha-methyl-leucine
  SITE 16: note = L-ornithine
  SITE 17: note = Lysine is chemically modified through conjugation of the epsilon-amino group of the Lysine side chain with (2-[2-(2-Amino-ethoxy)-ethoxy]-acetyl)-(gamma-Glu)-CO-(CH2) 16-CO2H
  SITE 20: note = 3-(4-Pyridyl)-L-alanine
  SITE 24: note = D-amino acid
  SITE 25: note = alpha-methyl-L-tyrosine
  SITE 41: note = Amidated residue
YXQGTXTSDXXIXLDXKAQXEFIEXLIEGGPSSGEPPPGGE

SEQ ID NO: 1152 - protein, 41 aa, synthetic construct
  SITE 2: note = 2-Aminoisobutyric Acid
  SITE 6: note = alpha-methyl-2-fluoro-L-phenylalanine
  SITE 10: note = 3-(4-Pyridyl)-L-alanine
  SITE 11: note = alpha-methyl-L-serine
  SITE 13: note = alpha-methyl-leucine
  SITE 16: note = L-ornithine
  SITE 17: note = Lysine is chemically modified through conjugation of the epsilon-amino group of the Lysine side chain with (2-[2-(2-Amino-ethoxy)-ethoxy]-acetyl)-(gamma-Glu)-CO-(CH2) 16-CO2H
  SITE 20: note = 3-(4-Pyridyl)-L-alanine
  SITE 24: note = D-amino acid
  SITE 25: note = alpha-methyl-L-tyrosine
  SITE 41: note = Amidated residue
YXQGTXTSDXXIXLDXKAQXEFIEXLIEGGPSSGAPPPESE

SEQ ID NO: 1153 - protein, 41 aa, synthetic construct
  SITE 2: note = 2-Aminoisobutyric Acid
  SITE 6: note = alpha-methyl-2-fluoro-L-phenylalanine
  SITE 10: note = 3-(4-Pyridyl)-L-alanine
  SITE 11: note = alpha-methyl-L-serine
  SITE 13: note = alpha-methyl-leucine
  SITE 16: note = L-ornithine
  SITE 17: note = Lysine is chemically modified through conjugation of the epsilon-amino group of the Lysine side chain with (2-[2-(2-Amino-ethoxy)-ethoxy]-acetyl)-(gamma-Glu)-CO-(CH2) 16-CO2H
  SITE 20: note = 3-(4-Pyridyl)-L-alanine
  SITE 24: note = D-amino acid
  SITE 25: note = alpha-methyl-L-tyrosine
  SITE 41: note = Amidated residue
YXQGTXTSDXXIXLDXKAQXEFIEXLIEGGPSSGEPPPESE

SEQ ID NO: 1154 - protein, 41 aa, synthetic construct
  SITE 2: note = 2-Aminoisobutyric Acid
  SITE 6: note = alpha-methyl-2-fluoro-L-phenylalanine
  SITE 10: note = 3-(4-Pyridyl)-L-alanine
  SITE 11: note = alpha-methyl-L-serine
  SITE 13: note = alpha-methyl-leucine
  SITE 16: note = L-ornithine
  SITE 17: note = Lysine is chemically modified through conjugation of the epsilon-amino group of the Lysine side chain with (2-[2-(2-Amino-ethoxy)-ethoxy]-acetyl)-(gamma-Glu)-CO-(CH2) 16-CO2H
  SITE 20: note = 3-(4-Pyridyl)-L-alanine
  SITE 24: note = D-amino acid
  SITE 25: note = alpha-methyl-L-tyrosine
  SITE 41: note = Amidated residue
YXQGTXTSDXXIXLDXKAQXEFIEXLIEGGPSSGAPPPEGE

SEQ ID NO: 1155 - protein, 41 aa, synthetic construct
  SITE 2: note = 2-Aminoisobutyric Acid
  SITE 6: note = alpha-methyl-2-fluoro-L-phenylalanine
  SITE 10: note = 3-(4-Pyridyl)-L-alanine
  SITE 11: note = alpha-methyl-L-serine
  SITE 13: note = alpha-methyl-leucine
  SITE 16: note = L-ornithine
  SITE 17: note = Lysine is chemically modified through conjugation of the epsilon-amino group of the Lysine side chain with (2-[2-(2-Amino-ethoxy)-ethoxy]-acetyl)-(gamma-Glu)-CO-(CH2) 16-CO2H
  SITE 20: note = 3-(4-Pyridyl)-L-alanine
  SITE 24: note = D-amino acid
  SITE 25: note = alpha-methyl-L-tyrosine
  SITE 41: note = Amidated residue
YXQGTXTSDXXIXLDXKAQXEFIEXLIEGGPSSGEPPPEGE

SEQ ID NO: 1156 - protein, 41 aa, synthetic construct; identical to SEQ ID NO: 1146
  SITE 2: note = 2-Aminoisobutyric Acid
  SITE 6: note = alpha-methyl-2-fluoro-L-phenylalanine
  SITE 10: note = 3-(4-Pyridyl)-L-alanine
  SITE 11: note = alpha-methyl-L-serine
  SITE 13: note = alpha-methyl-leucine
  SITE 16: note = L-ornithine
  SITE 17: note = Lysine is chemically modified through conjugation of the epsilon-amino group of the Lysine side chain with (gamma-Glu)2-CO-(CH2)16-CO2H
  SITE 20: note = 3-(4-Pyridyl)-L-alanine
  SITE 24: note = D-amino acid
  SITE 25: note = alpha-methyl-L-tyrosine
  SITE 41: note = Amidated residue

SEQ ID NO: 1157 - protein, 41 aa, synthetic construct; identical to SEQ ID NO: 1147
  SITE 2: note = 2-Aminoisobutyric Acid
  SITE 6: note = alpha-methyl-2-fluoro-L-phenylalanine
  SITE 10: note = 3-(4-Pyridyl)-L-alanine
  SITE 11: note = alpha-methyl-L-serine
  SITE 13: note = alpha-methyl-leucine
  SITE 16: note = L-ornithine
  SITE 17: note = Lysine is chemically modified through conjugation of the epsilon-amino group of the Lysine side chain with (gamma-Glu)2-CO-(CH2)16-CO2H
  SITE 20: note = 3-(4-Pyridyl)-L-alanine
  SITE 24: note = D-amino acid
  SITE 25: note = alpha-methyl-L-tyrosine
  SITE 41: note = Amidated residue

SEQ ID NO: 1158 - protein, 41 aa, synthetic construct
  SITE 2: note = 2-Aminoisobutyric Acid
  SITE 6: note = alpha-methyl-2-fluoro-L-phenylalanine
  SITE 10: note = 3-(4-Pyridyl)-L-alanine
  SITE 11: note = alpha-methyl-L-serine
  SITE 13: note = alpha-methyl-leucine
  SITE 16: note = L-ornithine
  SITE 17: note = Lysine is chemically modified through conjugation of the epsilon-amino group of the Lysine side chain with (2-[2-(2-Amino-ethoxy)-ethoxy]-acetyl)-(gamma-Glu)-CO-(CH2) 16-CO2H
  SITE 20: note = 3-(4-Pyridyl)-L-alanine
  SITE 24: note = D-amino acid
  SITE 25: note = alpha-methyl-L-tyrosine
  SITE 41: note = Amidated residue
YXQGTXTSDXXIXLDXKAQXEFIEXLVEGGPSSGAPPPTGE

SEQ ID NO: 1159 - protein, 41 aa, synthetic construct
  SITE 2: note = 2-Aminoisobutyric Acid
  SITE 6: note = alpha-methyl-2-fluoro-L-phenylalanine
  SITE 10: note = 3-(4-Pyridyl)-L-alanine
  SITE 11: note = alpha-methyl-L-serine
  SITE 13: note = alpha-methyl-leucine
  SITE 16: note = L-ornithine
  SITE 17: note = Lysine is chemically modified through conjugation of the epsilon-amino group of the Lysine side chain with (2-[2-(2-Amino-ethoxy)-ethoxy]-acetyl)-(gamma-Glu)-CO-(CH2) 16-CO2H
  SITE 20: note = 3-(4-Pyridyl)-L-alanine
  SITE 24: note = D-amino acid
  SITE 25: note = alpha-methyl-L-tyrosine
  SITE 41: note = Amidated residue
YXQGTXTSDXXIXLDXKAQXEFIEXLVEGGPSSGEPPPTGE

SEQ ID NO: 1160 - protein, 41 aa, synthetic construct
  SITE 2: note = 2-Aminoisobutyric Acid
  SITE 6: note = alpha-methyl-2-fluoro-L-phenylalanine
  SITE 10: note = 3-(4-Pyridyl)-L-alanine
  SITE 11: note = alpha-methyl-L-serine
  SITE 13: note = alpha-methyl-leucine
  SITE 16: note = L-ornithine
  SITE 17: note = Lysine is chemically modified through conjugation of the epsilon-amino group of the Lysine side chain with (2-[2-(2-Amino-ethoxy)-ethoxy]-acetyl)-(gamma-Glu)-CO-(CH2) 16-CO2H
  SITE 20: note = 3-(4-Pyridyl)-L-alanine
  SITE 24: note = D-amino acid
  SITE 25: note = alpha-methyl-L-tyrosine
  SITE 41: note = Amidated residue
YXQGTXTSDXXIXLDXKAQXEFIEXLVEGGPSSGAPPPGGE

SEQ ID NO: 1161 - protein, 41 aa, synthetic construct
  SITE 2: note = 2-Aminoisobutyric Acid
  SITE 6: note = alpha-methyl-2-fluoro-L-phenylalanine
  SITE 10: note = 3-(4-Pyridyl)-L-alanine
  SITE 11: note = alpha-methyl-L-serine
  SITE 13: note = alpha-methyl-leucine
  SITE 16: note = L-ornithine
  SITE 17: note = Lysine is chemically modified through conjugation of the epsilon-amino group of the Lysine side chain with (2-[2-(2-Amino-ethoxy)-ethoxy]-acetyl)-(gamma-Glu)-CO-(CH2) 16-CO2H
  SITE 20: note = 3-(4-Pyridyl)-L-alanine
  SITE 24: note = D-amino acid
  SITE 25: note = alpha-methyl-L-tyrosine
  SITE 41: note = Amidated residue
YXQGTXTSDXXIXLDXKAQXEFIEXLVEGGPSSGEPPPGGE

SEQ ID NO: 1162 - protein, 41 aa, synthetic construct
  SITE 2: note = 2-Aminoisobutyric Acid
  SITE 6: note = alpha-methyl-2-fluoro-L-phenylalanine
  SITE 10: note = 3-(4-Pyridyl)-L-alanine
  SITE 11: note = alpha-methyl-L-serine
  SITE 13: note = alpha-methyl-leucine
  SITE 16: note = L-ornithine
  SITE 17: note = Lysine is chemically modified through conjugation of the epsilon-amino group of the Lysine side chain with (2-[2-(2-Amino-ethoxy)-ethoxy]-acetyl)-(gamma-Glu)-CO-(CH2) 16-CO2H
  SITE 20: note = 3-(4-Pyridyl)-L-alanine
  SITE 24: note = D-amino acid
  SITE 25: note = alpha-methyl-L-tyrosine
  SITE 41: note = Amidated residue
YXQGTXTSDXXIXLDXKAQXEFIEXLVEGGPSSGAPPPESE

SEQ ID NO: 1163 - protein, 41 aa, synthetic construct
  SITE 2: note = 2-Aminoisobutyric Acid
  SITE 6: note = alpha-methyl-2-fluoro-L-phenylalanine
  SITE 10: note = 3-(4-Pyridyl)-L-alanine
  SITE 11: note = alpha-methyl-L-serine
  SITE 13: note = alpha-methyl-leucine
  SITE 16: note = L-ornithine
  SITE 17: note = Lysine is chemically modified through conjugation of the epsilon-amino group of the Lysine side chain with (2-[2-(2-Amino-ethoxy)-ethoxy]-acetyl)-(gamma-Glu)-CO-(CH2) 16-CO2H
  SITE 20: note = 3-(4-Pyridyl)-L-alanine
  SITE 24: note = D-amino acid
  SITE 25: note = alpha-methyl-L-tyrosine
  SITE 41: note = Amidated residue
YXQGTXTSDXXIXLDXKAQXEFIEXLVEGGPSSGEPPPESE

SEQ ID NO: 1164 - protein, 41 aa, synthetic construct
  SITE 2: note = 2-Aminoisobutyric Acid
  SITE 6: note = alpha-methyl-2-fluoro-L-phenylalanine
  SITE 10: note = 3-(4-Pyridyl)-L-alanine
  SITE 11: note = alpha-methyl-L-serine
  SITE 13: note = alpha-methyl-leucine
  SITE 16: note = L-ornithine
  SITE 17: note = Lysine is chemically modified through conjugation of the epsilon-amino group of the Lysine side chain with (2-[2-(2-Amino-ethoxy)-ethoxy]-acetyl)-(gamma-Glu)-CO-(CH2) 16-CO2H
  SITE 20: note = 3-(4-Pyridyl)-L-alanine
  SITE 24: note = D-amino acid
  SITE 25: note = alpha-methyl-L-tyrosine
  SITE 41: note = Amidated residue
YXQGTXTSDXXIXLDXKAQXEFIEXLVEGGPSSGAPPPEGE

SEQ ID NO: 1165 - protein, 41 aa, synthetic construct
  SITE 2: note = 2-Aminoisobutyric Acid
  SITE 6: note = alpha-methyl-2-fluoro-L-phenylalanine
  SITE 10: note = 3-(4-Pyridyl)-L-alanine
  SITE 11: note = alpha-methyl-L-serine
  SITE 13: note = alpha-methyl-leucine
  SITE 16: note = L-ornithine
  SITE 17: note = Lysine is chemically modified through conjugation of the epsilon-amino group of the Lysine side chain with (2-[2-(2-Amino-ethoxy)-ethoxy]-acetyl)-(gamma-Glu)-CO-(CH2) 16-CO2H
  SITE 20: note = 3-(4-Pyridyl)-L-alanine
  SITE 24: note = D-amino acid
  SITE 25: note = alpha-methyl-L-tyrosine
  SITE 41: note = Amidated residue
YXQGTXTSDXXIXLDXKAQXEFIEXLVEGGPSSGEPPPEGE

SEQ ID NO: 1166 - protein, 41 aa, synthetic construct; identical to SEQ ID NO: 755
  SITE 2: note = 2-Aminoisobutyric Acid
  SITE 6: note = alpha-methyl-2-fluoro-L-phenylalanine
  SITE 10: note = 3-(4-Pyridyl)-L-alanine
  SITE 11: note = alpha-methyl-L-serine
  SITE 13: note = alpha-methyl-leucine
  SITE 16: note = L-ornithine
  SITE 17: note = Lysine is chemically modified through conjugation of the epsilon-amino group of the Lysine side chain with (gamma-Glu)2-CO-(CH2)16-CO2H
  SITE 20: note = 3-(4-Pyridyl)-L-alanine
  SITE 24: note = D-amino acid
  SITE 25: note = alpha-methyl-L-tyrosine
  SITE 41: note = Amidated residue

SEQ ID NO: 1167 - protein, 41 aa, synthetic construct; identical to SEQ ID NO: 756
  SITE 2: note = 2-Aminoisobutyric Acid
  SITE 6: note = alpha-methyl-2-fluoro-L-phenylalanine
  SITE 10: note = 3-(4-Pyridyl)-L-alanine
  SITE 11: note = alpha-methyl-L-serine
  SITE 13: note = alpha-methyl-leucine
  SITE 16: note = L-ornithine
  SITE 17: note = Lysine is chemically modified through conjugation of the epsilon-amino group of the Lysine side chain with (gamma-Glu)2-CO-(CH2)16-CO2H
  SITE 20: note = 3-(4-Pyridyl)-L-alanine
  SITE 24: note = D-amino acid
  SITE 25: note = alpha-methyl-L-tyrosine
  SITE 41: note = Amidated residue

SEQ ID NO: 1168 - protein, 42 aa, synthetic construct; identical to SEQ ID NO: 757
  SITE 2: note = 2-Aminoisobutyric Acid
  SITE 6: note = alpha-methyl-2-fluoro-L-phenylalanine
  SITE 10: note = 3-(4-Pyridyl)-L-alanine
  SITE 11: note = alpha-methyl-L-serine
  SITE 13: note = alpha-methyl-leucine
  SITE 16: note = L-ornithine
  SITE 17: note = Lysine is chemically modified through conjugation of the epsilon-amino group of the Lysine side chain with (gamma-Glu)2-CO-(CH2)16-CO2H
  SITE 20: note = 3-(4-Pyridyl)-L-alanine
  SITE 24: note = D-amino acid
  SITE 25: note = alpha-methyl-L-tyrosine
  SITE 42: note = Amidated residue

SEQ ID NO: 1169 - protein, 42 aa, synthetic construct; identical to SEQ ID NO: 758
  SITE 2: note = 2-Aminoisobutyric Acid
  SITE 6: note = alpha-methyl-2-fluoro-L-phenylalanine
  SITE 10: note = 3-(4-Pyridyl)-L-alanine
  SITE 11: note = alpha-methyl-L-serine
  SITE 13: note = alpha-methyl-leucine
  SITE 16: note = L-ornithine
  SITE 17: note = Lysine is chemically modified through conjugation of the epsilon-amino group of the Lysine side chain with (gamma-Glu)2-CO-(CH2)16-CO2H
  SITE 20: note = 3-(4-Pyridyl)-L-alanine
  SITE 24: note = D-amino acid
  SITE 25: note = alpha-methyl-L-tyrosine
  SITE 42: note = Amidated residue

SEQ ID NO: 1170 - protein, 41 aa, synthetic construct; identical to SEQ ID NO: 1146
  SITE 2: note = 2-Aminoisobutyric Acid
  SITE 6: note = alpha-methyl-L-phenylalanine
  SITE 10: note = 3-(4-Pyridyl)-L-alanine
  SITE 11: note = alpha-methyl-L-serine
  SITE 13: note = alpha-methyl-leucine
  SITE 16: note = L-ornithine
  SITE 17: note = Lysine is chemically modified through conjugation of the epsilon-amino group of the Lysine side chain with (2-[2-(2-Amino-ethoxy)-ethoxy]-acetyl)-(gamma-Glu)-CO-(CH2) 16-CO2H
  SITE 20: note = 3-(4-Pyridyl)-L-alanine
  SITE 24: note = D-amino acid
  SITE 25: note = alpha-methyl-L-tyrosine
  SITE 41: note = Amidated residue

SEQ ID NO: 1171 - protein, 41 aa, synthetic construct; identical to SEQ ID NO: 1147
  SITE 2: note = 2-Aminoisobutyric Acid
  SITE 6: note = alpha-methyl-L-phenylalanine
  SITE 10: note = 3-(4-Pyridyl)-L-alanine
  SITE 11: note = alpha-methyl-L-serine
  SITE 13: note = alpha-methyl-leucine
  SITE 16: note = L-ornithine
  SITE 17: note = Lysine is chemically modified through conjugation of the epsilon-amino group of the Lysine side chain with (2-[2-(2-Amino-ethoxy)-ethoxy]-acetyl)-(gamma-Glu)-CO-(CH2) 16-CO2H
  SITE 20: note = 3-(4-Pyridyl)-L-alanine
  SITE 24: note = D-amino acid
  SITE 25: note = alpha-methyl-L-tyrosine
  SITE 41: note = Amidated residue

SEQ ID NO: 1172 - protein, 42 aa, synthetic construct; identical to SEQ ID NO: 718
  SITE 2: note = 2-Aminoisobutyric Acid
  SITE 6: note = alpha-methyl-L-phenylalanine
  SITE 10: note = 3-(4-Pyridyl)-L-alanine
  SITE 11: note = alpha-methyl-L-serine
  SITE 13: note = alpha-methyl-leucine
  SITE 16: note = L-ornithine
  SITE 17: note = Lysine is chemically modified through conjugation of the epsilon-amino group of the Lysine side chain with (2-[2-(2-Amino-ethoxy)-ethoxy]-acetyl)-(gamma-Glu)-CO-(CH2) 16-CO2H
  SITE 20: note = 3-(4-Pyridyl)-L-alanine
  SITE 24: note = D-amino acid
  SITE 25: note = alpha-methyl-L-tyrosine
  SITE 42: note = Amidated residue

SEQ ID NO: 1173 - protein, 42 aa, synthetic construct; identical to SEQ ID NO: 722
  SITE 2: note = 2-Aminoisobutyric Acid
  SITE 6: note = alpha-methyl-L-phenylalanine
  SITE 10: note = 3-(4-Pyridyl)-L-alanine
  SITE 11: note = alpha-methyl-L-serine
  SITE 13: note = alpha-methyl-leucine
  SITE 16: note = L-ornithine
  SITE 17: note = Lysine is chemically modified through conjugation of the epsilon-amino group of the Lysine side chain with (2-[2-(2-Amino-ethoxy)-ethoxy]-acetyl)-(gamma-Glu)-CO-(CH2) 16-CO2H
  SITE 20: note = 3-(4-Pyridyl)-L-alanine
  SITE 24: note = D-amino acid
  SITE 25: note = alpha-methyl-L-tyrosine
  SITE 42: note = Amidated residue

SEQ ID NO: 1174 - protein, 43 aa, synthetic construct; identical to SEQ ID NO: 747
  SITE 2: note = 2-Aminoisobutyric Acid
  SITE 6: note = alpha-methyl-L-phenylalanine
  SITE 10: note = 3-(4-Pyridyl)-L-alanine
  SITE 11: note = alpha-methyl-L-serine
  SITE 13: note = alpha-methyl-leucine
  SITE 16: note = L-ornithine
  SITE 17: note = Lysine is chemically modified through conjugation of the epsilon-amino group of the Lysine side chain with (2-[2-(2-Amino-ethoxy)-ethoxy]-acetyl)-(gamma-Glu)-CO-(CH2) 16-CO2H
  SITE 20: note = 3-(4-Pyridyl)-L-alanine
  SITE 24: note = D-amino acid
  SITE 25: note = alpha-methyl-L-tyrosine
  SITE 43: note = Amidated residue

SEQ ID NO: 1175 - protein, 43 aa, synthetic construct; identical to SEQ ID NO: 748
  SITE 2: note = 2-Aminoisobutyric Acid
  SITE 6: note = alpha-methyl-L-phenylalanine
  SITE 10: note = 3-(4-Pyridyl)-L-alanine
  SITE 11: note = alpha-methyl-L-serine
  SITE 13: note = alpha-methyl-leucine
  SITE 16: note = L-ornithine
  SITE 17: note = Lysine is chemically modified through conjugation of the epsilon-amino group of the Lysine side chain with (2-[2-(2-Amino-ethoxy)-ethoxy]-acetyl)-(gamma-Glu)-CO-(CH2) 16-CO2H
  SITE 20: note = 3-(4-Pyridyl)-L-alanine
  SITE 24: note = D-amino acid
  SITE 25: note = alpha-methyl-L-tyrosine
  SITE 43: note = Amidated residue

SEQ ID NO: 1176 - protein, 41 aa, synthetic construct; identical to SEQ ID NO: 1146
  SITE 2: note = 2-Aminoisobutyric Acid
  SITE 6: note = alpha-methyl-L-phenylalanine
  SITE 10: note = 3-(4-Pyridyl)-L-alanine
  SITE 11: note = alpha-methyl-L-serine
  SITE 13: note = alpha-methyl-leucine
  SITE 16: note = L-ornithine
  SITE 17: note = Lysine is chemically modified through conjugation of the epsilon-amino group of the Lysine side chain with (gamma-Glu)2-CO-(CH2)16-CO2H
  SITE 20: note = 3-(4-Pyridyl)-L-alanine
  SITE 24: note = D-amino acid
  SITE 25: note = alpha-methyl-L-tyrosine
  SITE 41: note = Amidated residue

SEQ ID NO: 1177 - protein, 41 aa, synthetic construct; identical to SEQ ID NO: 1147
  SITE 2: note = 2-Aminoisobutyric Acid
  SITE 6: note = alpha-methyl-L-phenylalanine
  SITE 10: note = 3-(4-Pyridyl)-L-alanine
  SITE 11: note = alpha-methyl-L-serine
  SITE 13: note = alpha-methyl-leucine
  SITE 16: note = L-ornithine
  SITE 17: note = Lysine is chemically modified through conjugation of the epsilon-amino group of the Lysine side chain with (gamma-Glu)2-CO-(CH2)16-CO2H
  SITE 20: note = 3-(4-Pyridyl)-L-alanine
  SITE 24: note = D-amino acid
  SITE 25: note = alpha-methyl-L-tyrosine
  SITE 41: note = Amidated residue

SEQ ID NO: 1178 - protein, 42 aa, synthetic construct; identical to SEQ ID NO: 718
  SITE 2: note = 2-Aminoisobutyric Acid
  SITE 6: note = alpha-methyl-L-phenylalanine
  SITE 10: note = 3-(4-Pyridyl)-L-alanine
  SITE 11: note = alpha-methyl-L-serine
  SITE 13: note = alpha-methyl-leucine
  SITE 16: note = L-ornithine
  SITE 17: note = Lysine is chemically modified through conjugation of the epsilon-amino group of the Lysine side chain with (gamma-Glu)2-CO-(CH2)16-CO2H
  SITE 20: note = 3-(4-Pyridyl)-L-alanine
  SITE 24: note = D-amino acid
  SITE 25: note = alpha-methyl-L-tyrosine
  SITE 42: note = Amidated residue

SEQ ID NO: 1179 - protein, 42 aa, synthetic construct; identical to SEQ ID NO: 722
  SITE 2: note = 2-Aminoisobutyric Acid
  SITE 6: note = alpha-methyl-L-phenylalanine
  SITE 10: note = 3-(4-Pyridyl)-L-alanine
  SITE 11: note = alpha-methyl-L-serine
  SITE 13: note = alpha-methyl-leucine
  SITE 16: note = L-ornithine
  SITE 17: note = Lysine is chemically modified through conjugation of the epsilon-amino group of the Lysine side chain with (gamma-Glu)2-CO-(CH2)16-CO2H
  SITE 20: note = 3-(4-Pyridyl)-L-alanine
  SITE 24: note = D-amino acid
  SITE 25: note = alpha-methyl-L-tyrosine
  SITE 42: note = Amidated residue

SEQ ID NO: 1180 - protein, 43 aa, synthetic construct; identical to SEQ ID NO: 747
  SITE 2: note = 2-Aminoisobutyric Acid
  SITE 6: note = alpha-methyl-L-phenylalanine
  SITE 10: note = 3-(4-Pyridyl)-L-alanine
  SITE 11: note = alpha-methyl-L-serine
  SITE 13: note = alpha-methyl-leucine
  SITE 16: note = L-ornithine
  SITE 17: note = Lysine is chemically modified through conjugation of the epsilon-amino group of the Lysine side chain with (gamma-Glu)2-CO-(CH2)16-CO2H
  SITE 20: note = 3-(4-Pyridyl)-L-alanine
  SITE 24: note = D-amino acid
  SITE 25: note = alpha-methyl-L-tyrosine
  SITE 43: note = Amidated residue

SEQ ID NO: 1181 - protein, 43 aa, synthetic construct; identical to SEQ ID NO: 748
  SITE 2: note = 2-Aminoisobutyric Acid
  SITE 6: note = alpha-methyl-L-phenylalanine
  SITE 10: note = 3-(4-Pyridyl)-L-alanine
  SITE 11: note = alpha-methyl-L-serine
  SITE 13: note = alpha-methyl-leucine
  SITE 16: note = L-ornithine
  SITE 17: note = Lysine is chemically modified through conjugation of the epsilon-amino group of the Lysine side chain with (gamma-Glu)2-CO-(CH2)16-CO2H
  SITE 20: note = 3-(4-Pyridyl)-L-alanine
  SITE 24: note = D-amino acid
  SITE 25: note = alpha-methyl-L-tyrosine
  SITE 43: note = Amidated residue

SEQ ID NO: 1182 - protein, 41 aa, synthetic construct; identical to SEQ ID NO: 1146
  SITE 2: note = 2-Aminoisobutyric Acid
  SITE 6: note = alpha-methyl-2-fluoro-L-phenylalanine
  SITE 10: note = 3-(4-Pyridyl)-L-alanine
  SITE 11: note = alpha-methyl-L-serine
  SITE 13: note = alpha-methyl-leucine
  SITE 16: note = L-ornithine
  SITE 17: note = Lysine is chemically modified through conjugation of the epsilon-amino group of the Lysine side chain with (2-[2-(2-Amino-ethoxy)-ethoxy]-acetyl)-(gamma-Glu)2-CO-(CH2 )16-CO2H
  SITE 20: note = 3-(4-Pyridyl)-L-alanine
  SITE 24: note = D-amino acid
  SITE 25: note = alpha-methyl-L-tyrosine
  SITE 41: note = Amidated residue

SEQ ID NO: 1183 - protein, 41 aa, synthetic construct; identical to SEQ ID NO: 1147
  SITE 2: note = 2-Aminoisobutyric Acid
  SITE 6: note = alpha-methyl-2-fluoro-L-phenylalanine
  SITE 10: note = 3-(4-Pyridyl)-L-alanine
  SITE 11: note = alpha-methyl-L-serine
  SITE 13: note = alpha-methyl-leucine
  SITE 16: note = L-ornithine
  SITE 17: note = Lysine is chemically modified through conjugation of the epsilon-amino group of the Lysine side chain with (2-[2-(2-Amino-ethoxy)-ethoxy]-acetyl)-(gamma-Glu)2-CO-(CH2 )16-CO2H
  SITE 20: note = 3-(4-Pyridyl)-L-alanine
  SITE 24: note = D-amino acid
  SITE 25: note = alpha-methyl-L-tyrosine
  SITE 41: note = Amidated residue

SEQ ID NO: 1184 - protein, 42 aa, synthetic construct; identical to SEQ ID NO: 718
  SITE 2: note = 2-Aminoisobutyric Acid
  SITE 6: note = alpha-methyl-2-fluoro-L-phenylalanine
  SITE 10: note = 3-(4-Pyridyl)-L-alanine
  SITE 11: note = alpha-methyl-L-serine
  SITE 13: note = alpha-methyl-leucine
  SITE 16: note = L-ornithine
  SITE 17: note = Lysine is chemically modified through conjugation of the epsilon-amino group of the Lysine side chain with (2-[2-(2-Amino-ethoxy)-ethoxy]-acetyl)-(gamma-Glu)2-CO-(CH2 )16-CO2H
  SITE 20: note = 3-(4-Pyridyl)-L-alanine
  SITE 24: note = D-amino acid
  SITE 25: note = alpha-methyl-L-tyrosine
  SITE 42: note = Amidated residue

SEQ ID NO: 1185 - protein, 42 aa, synthetic construct; identical to SEQ ID NO: 722
  SITE 2: note = 2-Aminoisobutyric Acid
  SITE 6: note = alpha-methyl-2-fluoro-L-phenylalanine
  SITE 10: note = 3-(4-Pyridyl)-L-alanine
  SITE 11: note = alpha-methyl-L-serine
  SITE 13: note = alpha-methyl-leucine
  SITE 16: note = L-ornithine
  SITE 17: note = Lysine is chemically modified through conjugation of the epsilon-amino group of the Lysine side chain with (2-[2-(2-Amino-ethoxy)-ethoxy]-acetyl)-(gamma-Glu)2-CO-(CH2 )16-CO2H
  SITE 20: note = 3-(4-Pyridyl)-L-alanine
  SITE 24: note = D-amino acid
  SITE 25: note = alpha-methyl-L-tyrosine
  SITE 42: note = Amidated residue

SEQ ID NO: 1186 - protein, 43 aa, synthetic construct; identical to SEQ ID NO: 747
  SITE 2: note = 2-Aminoisobutyric Acid
  SITE 6: note = alpha-methyl-2-fluoro-L-phenylalanine
  SITE 10: note = 3-(4-Pyridyl)-L-alanine
  SITE 11: note = alpha-methyl-L-serine
  SITE 13: note = alpha-methyl-leucine
  SITE 16: note = L-ornithine
  SITE 17: note = Lysine is chemically modified through conjugation of the epsilon-amino group of the Lysine side chain with (2-[2-(2-Amino-ethoxy)-ethoxy]-acetyl)-(gamma-Glu)2-CO-(CH2 )16-CO2H
  SITE 20: note = 3-(4-Pyridyl)-L-alanine
  SITE 24: note = D-amino acid
  SITE 25: note = alpha-methyl-L-tyrosine
  SITE 43: note = Amidated residue

SEQ ID NO: 1187 - protein, 43 aa, synthetic construct; identical to SEQ ID NO: 748
  SITE 2: note = 2-Aminoisobutyric Acid
  SITE 6: note = alpha-methyl-2-fluoro-L-phenylalanine
  SITE 10: note = 3-(4-Pyridyl)-L-alanine
  SITE 11: note = alpha-methyl-L-serine
  SITE 13: note = alpha-methyl-leucine
  SITE 16: note = L-ornithine
  SITE 17: note = Lysine is chemically modified through conjugation of the epsilon-amino group of the Lysine side chain with (2-[2-(2-Amino-ethoxy)-ethoxy]-acetyl)-(gamma-Glu)2-CO-(CH2 )16-CO2H
  SITE 20: note = 3-(4-Pyridyl)-L-alanine
  SITE 24: note = D-amino acid
  SITE 25: note = alpha-methyl-L-tyrosine
  SITE 43: note = Amidated residue

SEQ ID NO: 1188 - protein, 43 aa, synthetic construct
  SITE 2: note = 2-Aminoisobutyric Acid
  SITE 10: note = 3-(4-Pyridyl)-L-alanine
  SITE 11: note = alpha-methyl-L-serine
  SITE 13: note = alpha-methyl-leucine
  SITE 16: note = L-ornithine
  SITE 17: note = Lysine is chemically modified through conjugation of the epsilon-amino group of the Lysine side chain with D-Glutamic acid-(gamma-Glu)-CO-(CH2)16-CO2H
  SITE 20: note = 3-(4-Pyridyl)-L-alanine
  SITE 25: note = alpha-methyl-L-tyrosine
  SITE 29: note = 2-Aminoisobutyric Acid
  SITE 43: note = Amidated residue
YXQGTFTSDXXQXLDXKAQXQFIEXLIAXGPSSGEPPPSGGGE

SEQ ID NO: 1189 - protein, 43 aa, synthetic construct
  SITE 2: note = 2-Aminoisobutyric Acid
  SITE 10: note = 3-(4-Pyridyl)-L-alanine
  SITE 11: note = alpha-methyl-L-serine
  SITE 13: note = alpha-methyl-leucine
  SITE 16: note = L-ornithine
  SITE 17: note = Lysine is chemically modified through conjugation of the epsilon-amino group of the Lysine side chain with D-Glutamic acid-(gamma-Glu)-CO-(CH2)16-CO2H
  SITE 20: note = 3-(4-Pyridyl)-L-alanine
  SITE 25: note = alpha-methyl-L-tyrosine
  SITE 29: note = 2-Aminoisobutyric Acid
  SITE 43: note = Amidated residue
YXQGTFTSDXXQXLDXKAQXQFIQXLIEXGPSSGEPPPSGGGE

SEQ ID NO: 1190 - protein, 43 aa, synthetic construct
  SITE 2: note = 2-Aminoisobutyric Acid
  SITE 10: note = 3-(4-Pyridyl)-L-alanine
  SITE 11: note = alpha-methyl-L-serine
  SITE 13: note = alpha-methyl-leucine
  SITE 16: note = L-ornithine
  SITE 17: note = Lysine is chemically modified through conjugation of the epsilon-amino group of the Lysine side chain with D-Glutamic acid-(gamma-Glu)-CO-(CH2)16-CO2H
  SITE 20: note = 3-(4-Pyridyl)-L-alanine
  SITE 25: note = alpha-methyl-L-tyrosine
  SITE 29: note = 2-Aminoisobutyric Acid
  SITE 43: note = Amidated residue
YXQGTFTSDXXQXLDXKAQXQFIEXLIEXGPSSGEPPPSGGGE

SEQ ID NO: 1191 - protein, 43 aa, synthetic construct
  SITE 2: note = 2-Aminoisobutyric Acid
  SITE 10: note = 3-(4-Pyridyl)-L-alanine
  SITE 11: note = alpha-methyl-L-serine
  SITE 13: note = alpha-methyl-leucine
  SITE 16: note = L-ornithine
  SITE 17: note = Lysine is chemically modified through conjugation of the epsilon-amino group of the Lysine side chain with D-Glutamic acid-(gamma-Glu)-CO-(CH2)16-CO2H
  SITE 20: note = 3-(4-Pyridyl)-L-alanine
  SITE 25: note = alpha-methyl-L-tyrosine
  SITE 29: note = 2-Aminoisobutyric Acid
  SITE 43: note = Amidated residue
YXQGTFTSDXXQXLDXKAQXQFIEXLIAXGPSSGAPPPSGGGE

SEQ ID NO: 1192 - protein, 43 aa, synthetic construct; identical to SEQ ID NO: 1140
  SITE 2: note = 2-Aminoisobutyric Acid
  SITE 10: note = 3-(4-Pyridyl)-L-alanine
  SITE 11: note = alpha-methyl-L-serine
  SITE 13: note = alpha-methyl-leucine
  SITE 16: note = L-ornithine
  SITE 17: note = Lysine is chemically modified through conjugation of the epsilon-amino group of the Lysine side chain with D-Glutamic acid-(gamma-Glu)-CO-(CH2)16-CO2H
  SITE 20: note = 3-(4-Pyridyl)-L-alanine
  SITE 25: note = alpha-methyl-L-tyrosine
  SITE 29: note = 2-Aminoisobutyric Acid
  SITE 43: note = Amidated residue

SEQ ID NO: 1193 - protein, 43 aa, synthetic construct
  SITE 2: note = 2-Aminoisobutyric Acid
  SITE 10: note = 3-(4-Pyridyl)-L-alanine
  SITE 11: note = alpha-methyl-L-serine
  SITE 13: note = alpha-methyl-leucine
  SITE 16: note = L-ornithine
  SITE 17: note = Lysine is chemically modified through conjugation of the epsilon-amino group of the Lysine side chain with D-Glutamic acid-(gamma-Glu)-CO-(CH2)16-CO2H
  SITE 20: note = 3-(4-Pyridyl)-L-alanine
  SITE 25: note = alpha-methyl-L-tyrosine
  SITE 29: note = 2-Aminoisobutyric Acid
  SITE 43: note = Amidated residue
YXQGTFTSDXXQXLDXKAQXQFIEXLIEXGPSSGAPPPSGGGE

SEQ ID NO: 1194 - protein, 43 aa, synthetic construct
  SITE 2: note = 2-Aminoisobutyric Acid
  SITE 10: note = 3-(4-Pyridyl)-L-alanine
  SITE 11: note = alpha-methyl-L-serine
  SITE 13: note = alpha-methyl-leucine
  SITE 16: note = L-ornithine
  SITE 17: note = Lysine is chemically modified through conjugation of the epsilon-amino group of the Lysine side chain with D-Glutamic acid-(gamma-Glu)-CO-(CH2)16-CO2H
  SITE 20: note = 3-(4-Pyridyl)-L-alanine
  SITE 25: note = alpha-methyl-L-tyrosine
  SITE 43: note = Amidated residue
YXQGTFTSDXXQXLDXKAQXQFIQXLIEGGPSSGEPPPSGGGE

SEQ ID NO: 1195 - protein, 41 aa, synthetic construct
  SITE 2: note = 2-Aminoisobutyric Acid
  SITE 6: note = alpha-methyl-2-fluoro-L-phenylalanine
  SITE 10: note = 3-(4-Pyridyl)-L-alanine
  SITE 11: note = alpha-methyl-L-serine
  SITE 13: note = alpha-methyl-leucine
  SITE 16: note = L-ornithine
  SITE 17: note = Lysine is chemically modified through conjugation of the epsilon-amino group of the Lysine side chain with (2-[2-(2-Amino-ethoxy)-ethoxy]-acetyl)-(gamma-Glu)-CO-(CH2) 16-CO2H
  SITE 20: note = 3-(4-Pyridyl)-L-alanine
  SITE 24: note = D-amino acid
  SITE 25: note = alpha-methyl-L-tyrosine
  SITE 34: note = 2-Aminoisobutyric Acid
  SITE 35: note = L-ornithine
  SITE 39: note = L-ornithine
  SITE 41: note = Amidated residue
YXQGTXTSDXXIXLDXKAQXEFIEXLIEGGPPSXXPPPXGS

SEQ ID NO: 1196 - protein, 41 aa, synthetic construct
  SITE 2: note = 2-Aminoisobutyric Acid
  SITE 6: note = alpha-methyl-2-fluoro-L-phenylalanine
  SITE 10: note = 3-(4-Pyridyl)-L-alanine
  SITE 11: note = alpha-methyl-L-serine
  SITE 13: note = alpha-methyl-leucine
  SITE 16: note = L-ornithine
  SITE 17: note = Lysine is chemically modified through conjugation of the epsilon-amino group of the Lysine side chain with (2-[2-(2-Amino-ethoxy)-ethoxy]-acetyl)-(gamma-Glu)-CO-(CH2) 16-CO2H
  SITE 20: note = 3-(4-Pyridyl)-L-alanine
  SITE 24: note = D-amino acid
  SITE 25: note = alpha-methyl-L-tyrosine
  SITE 34: note = 2-Aminoisobutyric Acid
  SITE 41: note = Amidated residue
YXQGTXTSDXXIXLDXKAQXEFIEXLIEGGPPSXEPPPEGE

SEQ ID NO: 1197 - protein, 41 aa, synthetic construct
  SITE 2: note = 2-Aminoisobutyric Acid
  SITE 6: note = alpha-methyl-2-fluoro-L-phenylalanine
  SITE 10: note = 3-(4-Pyridyl)-L-alanine
  SITE 11: note = alpha-methyl-L-serine
  SITE 13: note = alpha-methyl-leucine
  SITE 16: note = L-ornithine
  SITE 17: note = Lysine is chemically modified through conjugation of the epsilon-amino group of the Lysine side chain with (2-[2-(2-Amino-ethoxy)-ethoxy]-acetyl)-(gamma-Glu)-CO-(CH2) 16-CO2H
  SITE 20: note = 3-(4-Pyridyl)-L-alanine
  SITE 24: note = D-amino acid
  SITE 25: note = alpha-methyl-L-tyrosine
  SITE 41: note = Amidated residue
YXQGTXTSDXXIXLDXKAQXEFIEXLIEGGPPSGEPPPEGE

SEQ ID NO: 1198 - protein, 41 aa, synthetic construct
  SITE 2: note = 2-Aminoisobutyric Acid
  SITE 6: note = alpha-methyl-2-fluoro-L-phenylalanine
  SITE 10: note = 3-(4-Pyridyl)-L-alanine
  SITE 11: note = alpha-methyl-L-serine
  SITE 13: note = alpha-methyl-leucine
  SITE 16: note = L-ornithine
  SITE 17: note = Lysine is chemically modified through conjugation of the epsilon-amino group of the Lysine side chain with (2-[2-(2-Amino-ethoxy)-ethoxy]-acetyl)-(gamma-Glu)-CO-(CH2) 16-CO2H
  SITE 20: note = 3-(4-Pyridyl)-L-alanine
  SITE 24: note = D-amino acid
  SITE 25: note = alpha-methyl-L-tyrosine
  SITE 34: note = 2-Aminoisobutyric Acid
  SITE 41: note = Amidated residue
YXQGTXTSDXXIXLDXKAQXEFIEXLIEGGPSSXAPPPEGE

SEQ ID NO: 1199 - protein, 41 aa, synthetic construct
  SITE 2: note = 2-Aminoisobutyric Acid
  SITE 6: note = alpha-methyl-2-fluoro-L-phenylalanine
  SITE 10: note = 3-(4-Pyridyl)-L-alanine
  SITE 11: note = alpha-methyl-L-serine
  SITE 13: note = alpha-methyl-leucine
  SITE 16: note = L-ornithine
  SITE 17: note = Lysine is chemically modified through conjugation of the epsilon-amino group of the Lysine side chain with (2-[2-(2-Amino-ethoxy)-ethoxy]-acetyl)-(gamma-Glu)-CO-(CH2) 16-CO2H
  SITE 20: note = 3-(4-Pyridyl)-L-alanine
  SITE 24: note = D-amino acid
  SITE 25: note = alpha-methyl-L-tyrosine
  SITE 34: note = 2-Aminoisobutyric Acid
  SITE 39: note = L-ornithine
  SITE 41: note = Amidated residue
YXQGTXTSDXXIXLDXKAQXEFIEXLIEGGPPSXEPPPXGE

SEQ ID NO: 1200 - protein, 41 aa, synthetic construct
  SITE 2: note = 2-Aminoisobutyric Acid
  SITE 6: note = alpha-methyl-2-fluoro-L-phenylalanine
  SITE 10: note = 3-(4-Pyridyl)-L-alanine
  SITE 11: note = alpha-methyl-L-serine
  SITE 13: note = alpha-methyl-leucine
  SITE 16: note = L-ornithine
  SITE 17: note = Lysine is chemically modified through conjugation of the epsilon-amino group of the Lysine side chain with (2-[2-(2-Amino-ethoxy)-ethoxy]-acetyl)-(gamma-Glu)-CO-(CH2) 16-CO2H
  SITE 20: note = 3-(4-Pyridyl)-L-alanine
  SITE 24: note = D-amino acid
  SITE 25: note = alpha-methyl-L-tyrosine
  SITE 34: note = 2-Aminoisobutyric Acid
  SITE 35: note = L-ornithine
  SITE 41: note = Amidated residue
YXQGTXTSDXXIXLDXKAQXEFIEXLIEGGPPSXXPPPEGE

SEQ ID NO: 1201 - protein, 41 aa, synthetic construct
  SITE 2: note = 2-Aminoisobutyric Acid
  SITE 6: note = alpha-methyl-2-fluoro-L-phenylalanine
  SITE 10: note = 3-(4-Pyridyl)-L-alanine
  SITE 11: note = alpha-methyl-L-serine
  SITE 13: note = alpha-methyl-leucine
  SITE 16: note = L-ornithine
  SITE 17: note = Lysine is chemically modified through conjugation of the epsilon-amino group of the Lysine side chain with (2-[2-(2-Amino-ethoxy)-ethoxy]-acetyl)-(gamma-Glu)-CO-(CH2) 16-CO2H
  SITE 20: note = 3-(4-Pyridyl)-L-alanine
  SITE 24: note = D-amino acid
  SITE 25: note = alpha-methyl-L-tyrosine
  SITE 34: note = 2-Aminoisobutyric Acid
  SITE 35: note = L-ornithine
  SITE 39: note = L-ornithine
  SITE 41: note = Amidated residue
YXQGTXTSDXXIXLDXKAQXEFIEXLIEGGPPSXXPPPXGE

SEQ ID NO: 1202 - protein, 41 aa, synthetic construct
  SITE 2: note = 2-Aminoisobutyric Acid
  SITE 6: note = alpha-methyl-2-fluoro-L-phenylalanine
  SITE 10: note = 3-(4-Pyridyl)-L-alanine
  SITE 11: note = alpha-methyl-L-serine
  SITE 13: note = alpha-methyl-leucine
  SITE 16: note = L-ornithine
  SITE 17: note = Lysine is chemically modified through conjugation of the epsilon-amino group of the Lysine side chain with (2-[2-(2-Amino-ethoxy)-ethoxy]-acetyl)-(gamma-Glu)-CO-(CH2) 16-CO2H
  SITE 20: note = 3-(4-Pyridyl)-L-alanine
  SITE 24: note = D-amino acid
  SITE 25: note = alpha-methyl-L-tyrosine
  SITE 34: note = 2-Aminoisobutyric Acid
  SITE 35: note = L-ornithine
  SITE 39: note = L-ornithine
  SITE 41: note = Amidated residue
YXQGTXTSDXXIXLDXKAQXEFIEXLIEGGPPSXXPPPXSE

SEQ ID NO: 1203 - protein, 43 aa, synthetic construct
  SITE 2: note = 2-Aminoisobutyric Acid
  SITE 6: note = alpha-methyl-2-fluoro-L-phenylalanine
  SITE 10: note = 3-(4-Pyridyl)-L-alanine
  SITE 11: note = alpha-methyl-L-serine
  SITE 13: note = alpha-methyl-leucine
  SITE 16: note = L-ornithine
  SITE 17: note = Lysine is chemically modified through conjugation of the epsilon-amino group of the Lysine side chain with (2-[2-(2-Amino-ethoxy)-ethoxy]-acetyl)-(gamma-Glu)-CO-(CH2) 16-CO2H
  SITE 20: note = 3-(4-Pyridyl)-L-alanine
  SITE 24: note = D-amino acid
  SITE 25: note = alpha-methyl-L-tyrosine
  SITE 34: note = 2-Aminoisobutyric Acid
  SITE 35: note = L-ornithine
  SITE 39: note = L-ornithine
  SITE 43: note = Amidated residue
YXQGTXTSDXXIXLDXKAQXEFIEXLIEGGPPSXXPPPXGGGE

SEQ ID NO: 1204 - protein, 42 aa, synthetic construct
  SITE 2: note = 2-Aminoisobutyric Acid
  SITE 6: note = alpha-methyl-2-fluoro-L-phenylalanine
  SITE 10: note = 3-(4-Pyridyl)-L-alanine
  SITE 11: note = alpha-methyl-L-serine
  SITE 13: note = alpha-methyl-leucine
  SITE 16: note = L-ornithine
  SITE 17: note = Lysine is chemically modified through conjugation of the epsilon-amino group of the Lysine side chain with (2-[2-(2-Amino-ethoxy)-ethoxy]-acetyl)-(gamma-Glu)-CO-(CH2) 16-CO2H
  SITE 20: note = 3-(4-Pyridyl)-L-alanine
  SITE 24: note = D-amino acid
  SITE 25: note = alpha-methyl-L-tyrosine
  SITE 34: note = 2-Aminoisobutyric Acid
  SITE 35: note = L-ornithine
  SITE 42: note = Amidated residue
YXQGTXTSDXXIXLDXKAQXEFIEXLIEGGPPSXXPPPSGSE

SEQ ID NO: 1205 - protein, 43 aa, synthetic construct
  SITE 2: note = 2-Aminoisobutyric Acid
  SITE 6: note = alpha-methyl-2-fluoro-L-phenylalanine
  SITE 10: note = 3-(4-Pyridyl)-L-alanine
  SITE 11: note = alpha-methyl-L-serine
  SITE 13: note = alpha-methyl-leucine
  SITE 16: note = L-ornithine
  SITE 17: note = Lysine is chemically modified through conjugation of the epsilon-amino group of the Lysine side chain with (2-[2-(2-Amino-ethoxy)-ethoxy]-acetyl)-(gamma-Glu)-CO-(CH2) 16-CO2H
  SITE 20: note = 3-(4-Pyridyl)-L-alanine
  SITE 24: note = D-amino acid
  SITE 25: note = alpha-methyl-L-tyrosine
  SITE 34: note = 2-Aminoisobutyric Acid
  SITE 35: note = L-ornithine
  SITE 43: note = Amidated residue
YXQGTXTSDXXIXLDXKAQXEFIEXLIEGGPPSXXPPPSGGGE

SEQ ID NO: 1206 - protein, 42 aa, synthetic construct
  SITE 2: note = 2-Aminoisobutyric Acid
  SITE 6: note = alpha-methyl-2-fluoro-L-phenylalanine
  SITE 10: note = 3-(4-Pyridyl)-L-alanine
  SITE 11: note = alpha-methyl-L-serine
  SITE 13: note = alpha-methyl-leucine
  SITE 16: note = L-ornithine
  SITE 17: note = Lysine is chemically modified through conjugation of the epsilon-amino group of the Lysine side chain with (2-[2-(2-Amino-ethoxy)-ethoxy]-acetyl)-(gamma-Glu)-CO-(CH2) 16-CO2H
  SITE 20: note = 3-(4-Pyridyl)-L-alanine
  SITE 24: note = D-amino acid
  SITE 25: note = alpha-methyl-L-tyrosine
  SITE 34: note = 2-Aminoisobutyric Acid
  SITE 42: note = Amidated residue
YXQGTXTSDXXIXLDXKAQXEFIEXLIEGGPPSXEPPPSGSE

SEQ ID NO: 1207 - protein, 43 aa, synthetic construct
  SITE 2: note = 2-Aminoisobutyric Acid
  SITE 6: note = alpha-methyl-2-fluoro-L-phenylalanine
  SITE 10: note = 3-(4-Pyridyl)-L-alanine
  SITE 11: note = alpha-methyl-L-serine
  SITE 13: note = alpha-methyl-leucine
  SITE 16: note = L-ornithine
  SITE 17: note = Lysine is chemically modified through conjugation of the epsilon-amino group of the Lysine side chain with (2-[2-(2-Amino-ethoxy)-ethoxy]-acetyl)-(gamma-Glu)-CO-(CH2) 16-CO2H
  SITE 20: note = 3-(4-Pyridyl)-L-alanine
  SITE 24: note = D-amino acid
  SITE 25: note = alpha-methyl-L-tyrosine
  SITE 34: note = 2-Aminoisobutyric Acid
  SITE 43: note = Amidated residue
YXQGTXTSDXXIXLDXKAQXEFIEXLIEGGPPSXEPPPSGGGE

SEQ ID NO: 1208 - protein, 41 aa, synthetic construct
  SITE 2: note = 2-Aminoisobutyric Acid
  SITE 6: note = alpha-methyl-2-fluoro-L-phenylalanine
  SITE 10: note = 3-(4-Pyridyl)-L-alanine
  SITE 11: note = alpha-methyl-L-serine
  SITE 13: note = alpha-methyl-leucine
  SITE 16: note = L-ornithine
  SITE 17: note = Lysine is chemically modified through conjugation of the epsilon-amino group of the Lysine side chain with (2-[2-(2-Amino-ethoxy)-ethoxy]-acetyl)-(gamma-Glu)-CO-(CH2) 16-CO2H
  SITE 20: note = 3-(4-Pyridyl)-L-alanine
  SITE 24: note = D-amino acid
  SITE 25: note = alpha-methyl-L-tyrosine
  SITE 41: note = Amidated residue
YXQGTXTSDXXIXLDXKAQXEFIQXLIEGGPSSGAPPPSGS

SEQ ID NO: 1209 - protein, 41 aa, synthetic construct
  SITE 2: note = 2-Aminoisobutyric Acid
  SITE 4: note = D-amino acid
  SITE 6: note = alpha-methyl-2-fluoro-L-phenylalanine
  SITE 10: note = 3-(4-Pyridyl)-L-alanine
  SITE 11: note = alpha-methyl-L-serine
  SITE 13: note = alpha-methyl-leucine
  SITE 16: note = L-ornithine
  SITE 17: note = Lysine is chemically modified through conjugation of the epsilon-amino group of the Lysine side chain with (2-[2-(2-Amino-ethoxy)-ethoxy]-acetyl)-(gamma-Glu)-CO-(CH2) 16-CO2H
  SITE 20: note = 2-Aminoisobutyric Acid
  SITE 24: note = D-amino acid
  SITE 25: note = alpha-methyl-L-tyrosine
  SITE 41: note = Amidated residue
YXQATXTSDXXIXLDXKAQXEFIEXLIEGGPSSGAPPPSGS

SEQ ID NO: 1210 - protein, 41 aa, synthetic construct
  SITE 2: note = 2-Aminoisobutyric Acid
  SITE 4: note = D-amino acid
  SITE 6: note = alpha-methyl-2-fluoro-L-phenylalanine
  SITE 10: note = 3-(4-Pyridyl)-L-alanine
  SITE 11: note = alpha-methyl-L-serine
  SITE 13: note = alpha-methyl-leucine
  SITE 16: note = L-ornithine
  SITE 17: note = Lysine is chemically modified through conjugation of the epsilon-amino group of the Lysine side chain with (2-[2-(2-Amino-ethoxy)-ethoxy]-acetyl)-(gamma-Glu)-CO-(CH2) 16-CO2H
  SITE 20: note = 2-Aminoisobutyric Acid
  SITE 24: note = D-amino acid
  SITE 25: note = alpha-methyl-L-tyrosine
  SITE 41: note = Amidated residue
YXQATXTSDXXIXLDXKAQXEFIEXLVEGGPSSGAPPPSGS

SEQ ID NO: 1211 - protein, 41 aa, synthetic construct
  SITE 2: note = 2-Aminoisobutyric Acid
  SITE 4: note = D-amino acid
  SITE 6: note = alpha-methyl-2-fluoro-L-phenylalanine
  SITE 10: note = 3-(4-Pyridyl)-L-alanine
  SITE 13: note = alpha-methyl-leucine
  SITE 16: note = L-ornithine
  SITE 17: note = Lysine is chemically modified through conjugation of the epsilon-amino group of the Lysine side chain with (2-[2-(2-Amino-ethoxy)-ethoxy]-acetyl)-(gamma-Glu)-CO-(CH2) 16-CO2H
  SITE 20: note = 3-(4-Pyridyl)-L-alanine
  SITE 24: note = D-amino acid
  SITE 25: note = alpha-methyl-L-tyrosine
  SITE 41: note = Amidated residue
YXQATXTSDXSIXLDXKAQXEFIEXLVEGGPSSGAPPPSGS

SEQ ID NO: 1212 - protein, 41 aa, synthetic construct
  SITE 2: note = 2-Aminoisobutyric Acid
  SITE 4: note = D-amino acid
  SITE 6: note = alpha-methyl-2-fluoro-L-phenylalanine
  SITE 10: note = 3-(4-Pyridyl)-L-alanine
  SITE 13: note = alpha-methyl-leucine
  SITE 16: note = L-ornithine
  SITE 17: note = Lysine is chemically modified through conjugation of the epsilon-amino group of the Lysine side chain with (2-[2-(2-Amino-ethoxy)-ethoxy]-acetyl)-(gamma-Glu)-CO-(CH2) 16-CO2H
  SITE 20: note = 3-(4-Pyridyl)-L-alanine
  SITE 24: note = D-amino acid
  SITE 25: note = alpha-methyl-L-tyrosine
  SITE 41: note = Amidated residue
YXQATXTSDXSIXLDXKAQXEFIEXLIEGGPSSGAPPPSGS

SEQ ID NO: 1213 - protein, 41 aa, synthetic construct; identical to SEQ ID NO: 705
  SITE 2: note = 2-Aminoisobutyric Acid
  SITE 6: note = alpha-methyl-2-fluoro-L-phenylalanine
  SITE 10: note = 3-(4-Pyridyl)-L-alanine
  SITE 11: note = alpha-methyl-L-serine
  SITE 13: note = alpha-methyl-leucine
  SITE 16: note = L-ornithine
  SITE 17: note = Lysine is chemically modified through conjugation of the epsilon-amino group of the Lysine side chain with (2-[2-(2-Amino-ethoxy)-ethoxy]-acetyl)2-(gamma-Glu)-CO-(CH2 )16-CO2H
  SITE 20: note = 3-(4-Pyridyl)-L-alanine
  SITE 24: note = D-amino acid
  SITE 25: note = alpha-methyl-L-tyrosine
  SITE 41: note = Amidated residue

SEQ ID NO: 1214 - protein, 41 aa, synthetic construct; identical to SEQ ID NO: 716
  SITE 2: note = 2-Aminoisobutyric Acid
  SITE 6: note = alpha-methyl-2-fluoro-L-phenylalanine
  SITE 10: note = 3-(4-Pyridyl)-L-alanine
  SITE 11: note = alpha-methyl-L-serine
  SITE 13: note = alpha-methyl-leucine
  SITE 16: note = L-ornithine
  SITE 17: note = Lysine is chemically modified through conjugation of the epsilon-amino group of the Lysine side chain with (2-[2-(2-Amino-ethoxy)-ethoxy]-acetyl)2-(gamma-Glu)-CO-(CH2 )16-CO2H
  SITE 20: note = 3-(4-Pyridyl)-L-alanine
  SITE 24: note = D-amino acid
  SITE 25: note = alpha-methyl-L-tyrosine
  SITE 41: note = Amidated residue

SEQ ID NO: 1215 - protein, 41 aa, synthetic construct
  SITE 2: note = 2-Aminoisobutyric Acid
  SITE 6: note = alpha-methyl-2-fluoro-L-phenylalanine
  SITE 10: note = 3-(4-Pyridyl)-L-alanine
  SITE 13: note = alpha-methyl-leucine
  SITE 16: note = L-ornithine
  SITE 17: note = Ornithine is chemically modified through conjugation of the epsilon-amino group of the Ornithine side chain with (gamma-Glu)2-CO-(CH2)16-CO2H
  SITE 20: note = 3-(4-Pyridyl)-L-alanine
  SITE 21: note = L-ornithine
  SITE 24: note = D-amino acid
  SITE 25: note = alpha-methyl-L-tyrosine
  SITE 41: note = Amidated residue
YXQGTXTSDXSIXLDXXAQXXFIEXLIEGGPSSGEPPPETE

SEQ ID NO: 1216 - protein, 41 aa, synthetic construct
  SITE 2: note = 2-Aminoisobutyric Acid
  SITE 6: note = alpha-methyl-2-fluoro-L-phenylalanine
  SITE 10: note = 3-(4-Pyridyl)-L-alanine
  SITE 11: note = alpha-methyl-L-serine
  SITE 13: note = alpha-methyl-leucine
  SITE 16: note = L-ornithine
  SITE 17: note = Ornithine is chemically modified through conjugation of the epsilon-amino group of the Ornithine side chain with (2-[2-(2-Amino-ethoxy)-ethoxy]-acetyl)-(gamma-Glu)-CO-(CH2) 16-CO2H
  SITE 20: note = 3-(4-Pyridyl)-L-alanine
  SITE 24: note = D-amino acid
  SITE 25: note = alpha-methyl-L-tyrosine
  SITE 41: note = Amidated residue
YXQGTXTSDXXIXLDXXAQXEFIEXLVEGGPSSGAPPPSGS

SEQ ID NO: 1217 - protein, 41 aa, synthetic construct
  SITE 2: note = 2-Aminoisobutyric Acid
  SITE 6: note = alpha-methyl-2-fluoro-L-phenylalanine
  SITE 10: note = 3-(4-Pyridyl)-L-alanine
  SITE 11: note = alpha-methyl-L-serine
  SITE 13: note = alpha-methyl-leucine
  SITE 16: note = L-ornithine
  SITE 17: note = Ornithine is chemically modified through conjugation of the epsilon-amino group of the Ornithine side chain with (2-[2-(2-Amino-ethoxy)-ethoxy]-acetyl)-(gamma-Glu)-CO-(CH2) 16-CO2H
  SITE 20: note = 3-(4-Pyridyl)-L-alanine
  SITE 24: note = D-amino acid
  SITE 25: note = alpha-methyl-L-tyrosine
  SITE 41: note = Amidated residue
YXQGTXTSDXXIXLDXXAQXEFIEXLIEGGPSSGAPPPSGS

SEQ ID NO: 1218 - protein, 42 aa, synthetic construct
  SITE 2: note = 2-Aminoisobutyric Acid
  SITE 6: note = alpha-methyl-2-fluoro-L-phenylalanine
  SITE 10: note = 3-(4-Pyridyl)-L-alanine
  SITE 11: note = alpha-methyl-L-serine
  SITE 13: note = alpha-methyl-leucine
  SITE 16: note = L-ornithine
  SITE 17: note = Ornithine is chemically modified through conjugation of the epsilon-amino group of the Ornithine side chain with (2-[2-(2-Amino-ethoxy)-ethoxy]-acetyl)-(gamma-Glu)-CO-(CH2) 16-CO2H
  SITE 20: note = 3-(4-Pyridyl)-L-alanine
  SITE 24: note = D-amino acid
  SITE 25: note = alpha-methyl-L-tyrosine
  SITE 42: note = Amidated residue
YXQGTXTSDXXIXLDXXAQXEFIEXLIEGGPSSGAPPPSGSE

SEQ ID NO: 1219 - protein, 43 aa, synthetic construct
  SITE 2: note = 2-Aminoisobutyric Acid
  SITE 6: note = alpha-methyl-2-fluoro-L-phenylalanine
  SITE 10: note = 3-(4-Pyridyl)-L-alanine
  SITE 11: note = alpha-methyl-L-serine
  SITE 13: note = alpha-methyl-leucine
  SITE 16: note = L-ornithine
  SITE 17: note = Ornithine is chemically modified through conjugation of the epsilon-amino group of the Ornithine side chain with (2-[2-(2-Amino-ethoxy)-ethoxy]-acetyl)-(gamma-Glu)-CO-(CH2) 16-CO2H
  SITE 20: note = 3-(4-Pyridyl)-L-alanine
  SITE 24: note = D-amino acid
  SITE 25: note = alpha-methyl-L-tyrosine
  SITE 43: note = Amidated residue
YXQGTXTSDXXIXLDXXAQXEFIEXLIEGGPSSGAPPPSGGGE

SEQ ID NO: 1220 - protein, 44 aa, synthetic construct
  SITE 2: note = 2-Aminoisobutyric Acid
  SITE 6: note = alpha-methyl-2-fluoro-L-phenylalanine
  SITE 10: note = 3-(4-Pyridyl)-L-alanine
  SITE 11: note = alpha-methyl-L-serine
  SITE 13: note = alpha-methyl-leucine
  SITE 16: note = L-ornithine
  SITE 17: note = Lysine is chemically modified through conjugation of the epsilon-amino group of the Lysine side chain with (2-[2-(2-Amino-ethoxy)-ethoxy]-acetyl)-(gamma-Glu)-CO-(CH2) 16-CO2H
  SITE 20: note = 3-(4-Pyridyl)-L-alanine
  SITE 24: note = D-amino acid
  SITE 25: note = alpha-methyl-L-tyrosine
  SITE 44: note = Amidated residue
YXQGTXTSDXXIXLDXKAQXEFIEXLIEGGPSSGAPPPSGGGEE

SEQ ID NO: 1221 - protein, 45 aa, synthetic construct
  SITE 2: note = 2-Aminoisobutyric Acid
  SITE 6: note = alpha-methyl-2-fluoro-L-phenylalanine
  SITE 10: note = 3-(4-Pyridyl)-L-alanine
  SITE 11: note = alpha-methyl-L-serine
  SITE 13: note = alpha-methyl-leucine
  SITE 16: note = L-ornithine
  SITE 17: note = Lysine is chemically modified through conjugation of the epsilon-amino group of the Lysine side chain with (2-[2-(2-Amino-ethoxy)-ethoxy]-acetyl)-(gamma-Glu)-CO-(CH2) 16-CO2H
  SITE 20: note = 3-(4-Pyridyl)-L-alanine
  SITE 24: note = D-amino acid
  SITE 25: note = alpha-methyl-L-tyrosine
  SITE 45: note = Amidated residue
YXQGTXTSDXXIXLDXKAQXEFIEXLIEGGPSSGAPPPSGGGEEE

SEQ ID NO: 1222 - protein, 44 aa, synthetic construct
  SITE 2: note = 2-Aminoisobutyric Acid
  SITE 6: note = alpha-methyl-2-fluoro-L-phenylalanine
  SITE 10: note = 3-(4-Pyridyl)-L-alanine
  SITE 11: note = alpha-methyl-L-serine
  SITE 13: note = alpha-methyl-leucine
  SITE 16: note = L-ornithine
  SITE 17: note = Lysine is chemically modified through conjugation of the epsilon-amino group of the Lysine side chain with (2-[2-(2-Amino-ethoxy)-ethoxy]-acetyl)-(gamma-Glu)-CO-(CH2) 16-CO2H
  SITE 20: note = 3-(4-Pyridyl)-L-alanine
  SITE 24: note = D-amino acid
  SITE 25: note = alpha-methyl-L-tyrosine
  SITE 44: note = Amidated residue
YXQGTXTSDXXIXLDXKAQXEFIEXLIEGGPSSGAPPPEGGGEE

SEQ ID NO: 1223 - protein, 45 aa, synthetic construct
  SITE 2: note = 2-Aminoisobutyric Acid
  SITE 6: note = alpha-methyl-2-fluoro-L-phenylalanine
  SITE 10: note = 3-(4-Pyridyl)-L-alanine
  SITE 11: note = alpha-methyl-L-serine
  SITE 13: note = alpha-methyl-leucine
  SITE 16: note = L-ornithine
  SITE 17: note = Lysine is chemically modified through conjugation of the epsilon-amino group of the Lysine side chain with (2-[2-(2-Amino-ethoxy)-ethoxy]-acetyl)-(gamma-Glu)-CO-(CH2) 16-CO2H
  SITE 20: note = 3-(4-Pyridyl)-L-alanine
  SITE 24: note = D-amino acid
  SITE 25: note = alpha-methyl-L-tyrosine
  SITE 45: note = Amidated residue
YXQGTXTSDXXIXLDXKAQXEFIEXLIEGGPSSGAPPPEGGGEEE

SEQ ID NO: 1224 - protein, 44 aa, synthetic construct; identical to SEQ ID NO: 1220
  SITE 2: note = 2-Aminoisobutyric Acid
  SITE 6: note = alpha-methyl-2-fluoro-L-phenylalanine
  SITE 10: note = 3-(4-Pyridyl)-L-alanine
  SITE 11: note = alpha-methyl-L-serine
  SITE 13: note = alpha-methyl-leucine
  SITE 16: note = L-ornithine
  SITE 17: note = Lysine is chemically modified through conjugation of the epsilon-amino group of the Lysine side chain with (gamma-Glu)2-CO-(CH2)16-CO2H
  SITE 20: note = 3-(4-Pyridyl)-L-alanine
  SITE 24: note = D-amino acid
  SITE 25: note = alpha-methyl-L-tyrosine
  SITE 44: note = Amidated residue

SEQ ID NO: 1225 - protein, 45 aa, synthetic construct; identical to SEQ ID NO: 1221
  SITE 2: note = 2-Aminoisobutyric Acid
  SITE 6: note = alpha-methyl-2-fluoro-L-phenylalanine
  SITE 10: note = 3-(4-Pyridyl)-L-alanine
  SITE 11: note = alpha-methyl-L-serine
  SITE 13: note = alpha-methyl-leucine
  SITE 16: note = L-ornithine
  SITE 17: note = Lysine is chemically modified through conjugation of the epsilon-amino group of the Lysine side chain with (gamma-Glu)2-CO-(CH2)16-CO2H
  SITE 20: note = 3-(4-Pyridyl)-L-alanine
  SITE 24: note = D-amino acid
  SITE 25: note = alpha-methyl-L-tyrosine
  SITE 45: note = Amidated residue

SEQ ID NO: 1226 - protein, 44 aa, synthetic construct; identical to SEQ ID NO: 1222
  SITE 2: note = 2-Aminoisobutyric Acid
  SITE 6: note = alpha-methyl-2-fluoro-L-phenylalanine
  SITE 10: note = 3-(4-Pyridyl)-L-alanine
  SITE 11: note = alpha-methyl-L-serine
  SITE 13: note = alpha-methyl-leucine
  SITE 16: note = L-ornithine
  SITE 17: note = Lysine is chemically modified through conjugation of the epsilon-amino group of the Lysine side chain with (gamma-Glu)2-CO-(CH2)16-CO2H
  SITE 20: note = 3-(4-Pyridyl)-L-alanine
  SITE 24: note = D-amino acid
  SITE 25: note = alpha-methyl-L-tyrosine
  SITE 44: note = Amidated residue

SEQ ID NO: 1227 - protein, 45 aa, synthetic construct; identical to SEQ ID NO: 1223
  SITE 2: note = 2-Aminoisobutyric Acid
  SITE 6: note = alpha-methyl-2-fluoro-L-phenylalanine
  SITE 10: note = 3-(4-Pyridyl)-L-alanine
  SITE 11: note = alpha-methyl-L-serine
  SITE 13: note = alpha-methyl-leucine
  SITE 16: note = L-ornithine
  SITE 17: note = Lysine is chemically modified through conjugation of the epsilon-amino group of the Lysine side chain with (gamma-Glu)2-CO-(CH2)16-CO2H
  SITE 20: note = 3-(4-Pyridyl)-L-alanine
  SITE 24: note = D-amino acid
  SITE 25: note = alpha-methyl-L-tyrosine
  SITE 45: note = Amidated residue

SEQ ID NO: 1228 - protein, 42 aa, synthetic construct
  SITE 2: note = 2-Aminoisobutyric Acid
  SITE 4: note = D-amino acid
  SITE 6: note = alpha-methyl-2-fluoro-L-phenylalanine
  SITE 10: note = 3-(4-Pyridyl)-L-alanine
  SITE 11: note = alpha-methyl-L-serine
  SITE 13: note = alpha-methyl-leucine
  SITE 16: note = L-ornithine
  SITE 17: note = Lysine is chemically modified through conjugation of the epsilon-amino group of the Lysine side chain with (2-[2-(2-Amino-ethoxy)-ethoxy]-acetyl)-(gamma-Glu)-CO-(CH2) 16-CO2H
  SITE 20: note = 2-Aminoisobutyric Acid
  SITE 24: note = D-amino acid
  SITE 25: note = alpha-methyl-L-tyrosine
  SITE 42: note = Amidated residue
YXQATXTSDXXIXLDXKAQXEFIEXLIEGGPSSGAPPPSGSE

SEQ ID NO: 1229 - protein, 43 aa, synthetic construct
  SITE 2: note = 2-Aminoisobutyric Acid
  SITE 4: note = D-amino acid
  SITE 6: note = alpha-methyl-2-fluoro-L-phenylalanine
  SITE 10: note = 3-(4-Pyridyl)-L-alanine
  SITE 11: note = alpha-methyl-L-serine
  SITE 13: note = alpha-methyl-leucine
  SITE 16: note = L-ornithine
  SITE 17: note = Lysine is chemically modified through conjugation of the epsilon-amino group of the Lysine side chain with (2-[2-(2-Amino-ethoxy)-ethoxy]-acetyl)-(gamma-Glu)-CO-(CH2) 16-CO2H
  SITE 20: note = 2-Aminoisobutyric Acid
  SITE 24: note = D-amino acid
  SITE 25: note = alpha-methyl-L-tyrosine
  SITE 43: note = Amidated residue
YXQATXTSDXXIXLDXKAQXEFIEXLIEGGPSSGAPPPSGGGE

SEQ ID NO: 1230 - protein, 42 aa, synthetic construct; identical to SEQ ID NO: 1228
  SITE 2: note = 2-Aminoisobutyric Acid
  SITE 4: note = D-amino acid
  SITE 6: note = alpha-methyl-2-fluoro-L-phenylalanine
  SITE 10: note = 3-(4-Pyridyl)-L-alanine
  SITE 11: note = alpha-methyl-L-serine
  SITE 13: note = alpha-methyl-leucine
  SITE 16: note = L-ornithine
  SITE 17: note = Lysine is chemically modified through conjugation of the epsilon-amino group of the Lysine side chain with (gamma-Glu)2-CO-(CH2)16-CO2H
  SITE 20: note = 2-Aminoisobutyric Acid
  SITE 24: note = D-amino acid
  SITE 25: note = alpha-methyl-L-tyrosine
  SITE 42: note = Amidated residue

SEQ ID NO: 1231 - protein, 43 aa, synthetic construct; identical to SEQ ID NO: 1229
  SITE 2: note = 2-Aminoisobutyric Acid
  SITE 4: note = D-amino acid
  SITE 6: note = alpha-methyl-2-fluoro-L-phenylalanine
  SITE 10: note = 3-(4-Pyridyl)-L-alanine
  SITE 11: note = alpha-methyl-L-serine
  SITE 13: note = alpha-methyl-leucine
  SITE 16: note = L-ornithine
  SITE 17: note = Lysine is chemically modified through conjugation of the epsilon-amino group of the Lysine side chain with (gamma-Glu)2-CO-(CH2)16-CO2H
  SITE 20: note = 2-Aminoisobutyric Acid
  SITE 24: note = D-amino acid
  SITE 25: note = alpha-methyl-L-tyrosine
  SITE 43: note = Amidated residue

SEQ ID NO: 1232 - protein, 41 aa, synthetic construct; identical to SEQ ID NO: 1195
  SITE 2: note = 2-Aminoisobutyric Acid
  SITE 6: note = alpha-methyl-2-fluoro-L-phenylalanine
  SITE 10: note = 3-(4-Pyridyl)-L-alanine
  SITE 11: note = alpha-methyl-L-serine
  SITE 13: note = alpha-methyl-leucine
  SITE 16: note = L-ornithine
  SITE 17: note = Lysine is chemically modified through conjugation of the epsilon-amino group of the Lysine side chain with (gamma-Glu)2-CO-(CH2)16-CO2H
  SITE 20: note = 3-(4-Pyridyl)-L-alanine
  SITE 24: note = D-amino acid
  SITE 25: note = alpha-methyl-L-tyrosine
  SITE 34: note = 2-Aminoisobutyric Acid
  SITE 35: note = L-ornithine
  SITE 39: note = L-ornithine
  SITE 41: note = Amidated residue

SEQ ID NO: 1233 - protein, 41 aa, synthetic construct; identical to SEQ ID NO: 1201
  SITE 2: note = 2-Aminoisobutyric Acid
  SITE 6: note = alpha-methyl-2-fluoro-L-phenylalanine
  SITE 10: note = 3-(4-Pyridyl)-L-alanine
  SITE 11: note = alpha-methyl-L-serine
  SITE 13: note = alpha-methyl-leucine
  SITE 16: note = L-ornithine
  SITE 17: note = Lysine is chemically modified through conjugation of the epsilon-amino group of the Lysine side chain with (gamma-Glu)2-CO-(CH2)16-CO2H
  SITE 20: note = 3-(4-Pyridyl)-L-alanine
  SITE 24: note = D-amino acid
  SITE 25: note = alpha-methyl-L-tyrosine
  SITE 34: note = 2-Aminoisobutyric Acid
  SITE 35: note = L-ornithine
  SITE 39: note = L-ornithine
  SITE 41: note = Amidated residue

SEQ ID NO: 1234 - protein, 41 aa, synthetic construct; identical to SEQ ID NO: 1202
  SITE 2: note = 2-Aminoisobutyric Acid
  SITE 6: note = alpha-methyl-2-fluoro-L-phenylalanine
  SITE 10: note = 3-(4-Pyridyl)-L-alanine
  SITE 11: note = alpha-methyl-L-serine
  SITE 13: note = alpha-methyl-leucine
  SITE 16: note = L-ornithine
  SITE 17: note = Lysine is chemically modified through conjugation of the epsilon-amino group of the Lysine side chain with (gamma-Glu)2-CO-(CH2)16-CO2H
  SITE 20: note = 3-(4-Pyridyl)-L-alanine
  SITE 24: note = D-amino acid
  SITE 25: note = alpha-methyl-L-tyrosine
  SITE 34: note = 2-Aminoisobutyric Acid
  SITE 35: note = L-ornithine
  SITE 39: note = L-ornithine
  SITE 41: note = Amidated residue

SEQ ID NO: 1235 - protein, 41 aa, synthetic construct
  SITE 2: note = 2-Aminoisobutyric Acid
  SITE 6: note = alpha-methyl-2-fluoro-L-phenylalanine
  SITE 10: note = 3-(4-Pyridyl)-L-alanine
  SITE 11: note = alpha-methyl-L-serine
  SITE 13: note = alpha-methyl-leucine
  SITE 16: note = L-ornithine
  SITE 17: note = Lysine is chemically modified through conjugation of the epsilon-amino group of the Lysine side chain with (gamma-Glu)2-CO-(CH2)16-CO2H
  SITE 20: note = 3-(4-Pyridyl)-L-alanine
  SITE 24: note = D-amino acid
  SITE 25: note = alpha-methyl-L-tyrosine
  SITE 34: note = 2-Aminoisobutyric Acid
  SITE 35: note = L-ornithine
  SITE 39: note = L-ornithine
  SITE 41: note = Amidated residue
YXQGTXTSDXXIXLDXKAQXEFIEXLIEGGPPSXXPPPXGG

SEQ ID NO: 1236 - protein, 41 aa, synthetic construct
  SITE 2: note = 2-Aminoisobutyric Acid
  SITE 6: note = alpha-methyl-2-fluoro-L-phenylalanine
  SITE 10: note = 3-(4-Pyridyl)-L-alanine
  SITE 13: note = alpha-methyl-leucine
  SITE 16: note = L-ornithine
  SITE 20: note = 3-(4-Pyridyl)-L-alanine
  SITE 21: note = L-ornithine
  SITE 24: note = D-amino acid
  SITE 25: note = alpha-methyl-L-tyrosine
  SITE 41: note = Amidated residue
YXQGTXTSDXSIXLDXQAQXXFIEXLIEGGPSSGEPPPETE

SEQ ID NO: 1237 - protein, 41 aa, synthetic construct
  SITE 2: note = 2-Aminoisobutyric Acid
  SITE 6: note = alpha-methyl-2-fluoro-L-phenylalanine
  SITE 10: note = 3-(4-Pyridyl)-L-alanine
  SITE 11: note = alpha-methyl-L-serine
  SITE 13: note = alpha-methyl-leucine
  SITE 16: note = L-ornithine
  SITE 20: note = 3-(4-Pyridyl)-L-alanine
  SITE 24: note = D-amino acid
  SITE 25: note = alpha-methyl-L-tyrosine
  SITE 41: note = Amidated residue
YXQGTXTSDXXIXLDXQAQXEFIEXLVEGGPSSGAPPPSGS

SEQ ID NO: 1238 - protein, 41 aa, synthetic construct
  SITE 2: note = 2-Aminoisobutyric Acid
  SITE 6: note = alpha-methyl-2-fluoro-L-phenylalanine
  SITE 10: note = 3-(4-Pyridyl)-L-alanine
  SITE 11: note = alpha-methyl-L-serine
  SITE 13: note = alpha-methyl-leucine
  SITE 16: note = L-ornithine
  SITE 20: note = 3-(4-Pyridyl)-L-alanine
  SITE 24: note = D-amino acid
  SITE 25: note = alpha-methyl-L-tyrosine
  SITE 41: note = Amidated residue
YXQGTXTSDXXIXLDXQAQXEFIEXLIEGGPSSGAPPPSGS

SEQ ID NO: 1239 - protein, 42 aa, synthetic construct
  SITE 2: note = 2-Aminoisobutyric Acid
  SITE 6: note = alpha-methyl-2-fluoro-L-phenylalanine
  SITE 10: note = 3-(4-Pyridyl)-L-alanine
  SITE 11: note = alpha-methyl-L-serine
  SITE 13: note = alpha-methyl-leucine
  SITE 16: note = L-ornithine
  SITE 20: note = 3-(4-Pyridyl)-L-alanine
  SITE 24: note = D-amino acid
  SITE 25: note = alpha-methyl-L-tyrosine
  SITE 42: note = Amidated residue
YXQGTXTSDXXIXLDXQAQXEFIEXLIEGGPSSGAPPPSGSE

SEQ ID NO: 1240 - protein, 43 aa, synthetic construct
  SITE 2: note = 2-Aminoisobutyric Acid
  SITE 6: note = alpha-methyl-2-fluoro-L-phenylalanine
  SITE 10: note = 3-(4-Pyridyl)-L-alanine
  SITE 11: note = alpha-methyl-L-serine
  SITE 13: note = alpha-methyl-leucine
  SITE 16: note = L-ornithine
  SITE 20: note = 3-(4-Pyridyl)-L-alanine
  SITE 24: note = D-amino acid
  SITE 25: note = alpha-methyl-L-tyrosine
  SITE 43: note = Amidated residue
YXQGTXTSDXXIXLDXQAQXEFIEXLIEGGPSSGAPPPSGGGE

SEQ ID NO: 1241 - protein, 44 aa, synthetic construct
  SITE 2: note = 2-Aminoisobutyric Acid
  SITE 10: note = 3-(4-Pyridyl)-L-alanine
  SITE 13: note = alpha-methyl-leucine
  SITE 16: note = L-ornithine
  SITE 17: note = Lysine is chemically modified through conjugation of the epsilon-amino group of the Lysine side chain with D-Glutamic acid-(gamma-Glu)-CO-(CH2)16-CO2H
  SITE 20: note = 3-(4-Pyridyl)-L-alanine
  SITE 24: note = D-amino acid
  SITE 25: note = alpha-methyl-L-tyrosine
  SITE 44: note = Amidated residue
YXQGTFTSDXSQXLDXKAQXEFIEXLIAGGPSSGAPPPSGSEEE

SEQ ID NO: 1242 - protein, 39 aa, synthetic construct
  SITE 2: note = 2-Aminoisobutyric Acid
  SITE 6: note = alpha-methyl-2-fluoro-L-phenylalanine
  SITE 10: note = 3-(4-Pyridyl)-L-alanine
  SITE 13: note = alpha-methyl-leucine
  SITE 16: note = L-ornithine
  SITE 17: note = Lysine is chemically modified through conjugation of the epsilon-amino group of the Lysine side chain with (2-[2-(2-Amino-ethoxy)-ethoxy]-acetyl)-(gamma-Glu)-CO-(CH2) 16-CO2H
  SITE 20: note = 2-Aminoisobutyric Acid
  SITE 24: note = D-amino acid
  SITE 25: note = alpha-methyl-L-tyrosine
  SITE 39: note = Amidated residue
YXQGTXTSDXSIXLDXKAAXAFIEXLLEGGPSSGEPPPS

SEQ ID NO: 1243 - protein, 46 aa, synthetic construct
  VARIANT 1: note = Y, N-methyl-tyrosine or H
  SITE 2: note = 2-Aminoisobutyric Acid
  VARIANT 4: note = G or D-alanine
  VARIANT 6: note = F, alpha-methyl-L-phenylalanine or alpha-methyl-2-fluoro-L-phenylalanine
  VARIANT 10: note = F, 3-(4-Pyridyl)-L-alanine, 4-cyano-L-phenylalanine, 3-(3-Pyridyl)-L-alanine, 4-nitro-L-phenylalanine or Y
  VARIANT 11: note = S or alpha-methyl-L-serine
  VARIANT 12: note = L-ornithine, K, R, Q, (S)-2,3-diaminopropanoic acid, (S)-2,4-diaminobutanoic acid, S, E or I
  VARIANT 13: note = alpha-methyl-leucine, I or L
  VARIANT 15: note = D or E
  VARIANT 16: note = K, L-ornithine, A or E
  VARIANT 17: note = Any amino acid with a functional group available for conjugation to a fatty acid, A, I, Q or L-ornithine
  VARIANT 17: note = at least one of positions 17, 20, 24 and 28 is an amino acid with a functional group available for conjugation to a fatty acid
  VARIANT 19: note = Q or A
  VARIANT 20: note = Any amino acid with a functional group available for conjugation to a fatty acid, 2-Aminoisobutyric Acid, alpha-methyl-3-(4-Pyridyl)-L-alanine, Q, R or L-isovaline
  VARIANT 20: note = at least one of positions 17, 20, 24 and 28 is an amino acid with a functional group available for conjugation to a fatty acid
  VARIANT 21: note = A, Q, L-ornithine, (S)-2-aminohexanedioic acid, 2-Aminoisobutyric Acid, S, N, E or T
  VARIANT 23: note = I or V
  VARIANT 24: note = Any amino acid with a functional group available for conjugation to a fatty acid, E, Q, D-glutamic acid, N or D-Glutamine
  VARIANT 24: note = at least one of positions 17, 20, 24 and 28 is an amino acid with a functional group available for conjugation to a fatty acid
  VARIANT 25: note = W, Y, F, 3-(4-Pyridyl)-L-alanine, alpha-methyl-L-tyrosine or alpha-methyl-3-(4-Pyridyl)-L-alanine
  VARIANT 27: note = L, I, E, V, A, Q, S, T or (S)-2-aminohexanedioic acid
  VARIANT 28: note = Any amino acid with a functional group available for conjugation to a fatty acid, E, Q or A
  VARIANT 28: note = at least one of positions 17, 20, 24 and 28 is an amino acid with a functional group available for conjugation to a fatty acid
  VARIANT 29: note = G, D-alanine, 2-Aminoisobutyric Acid, T or A
  VARIANT 30: note = A, S or G
  VARIANT 31: note = P, H, S, 3-(4-Pyridyl)-L-alanine, E, T, N6-acetyl-L-lysine or Hydroxy-L-proline
  VARIANT 32: note = S or P
  VARIANT 34: note = G or 2-Aminoisobutyric Acid
  VARIANT 35: note = A, 2-Aminoisobutyric Acid, E, D, H or 3-(4-Pyridyl)-L-alanine or L-ornithine
  VARIANT 36: note = P or Hydroxy-L-proline
  VARIANT 37: note = P, Hydroxy-L-proline or E
  VARIANT 38: note = P or Hydroxy-L-proline
  VARIANT 39: note = E, S, G, T, H, 3-(4-Pyridyl)-L-alanine, gamma-Glutamic acid or A or L-ornithine; wherein if positions 40-46 are absent, then position 39 may be amidated
  VARIANT 40: note = May be absent or G, E, S, A, T, or D-glutamic acid, wherein if position 40 is absent, then positions 41-46 are also absent; wherein if positions 41-46 are absent, then position 40 may be amidated
  VARIANT 41: note = wherein if position 40 is G, E, S, A, T or D-glutamic acid, then position 41 may be absent or A, E, S, T, 3-(4-Pyridyl)-L-alanine, D, G, gamma-Glutamic acid, D-glutamic acid, Q or H; wherein if position 41 is absent, then positions 42-46 are also absent; wherein if positions 42-46 are absent, then position 41 may be amidated
  VARIANT 42: note = wherein if position 41 is A, E, S, T, 3-(4-Pyridyl)-L-alanine, D, G, gamma-Glutamic acid, D-glutamic acid, Q or H, then position 42 may be absent or G, E, gamma-Glutamic acid, D-glutamic acid, or 2-[2-(2-amino-ethoxy)-ethoxy]-acetyl; wherein if position 42 is absent, then positions 43-46 are also absent; wherein if positions 43-46 are absent then position 42 may be amidated
  VARIANT 43: note = wherein if position 42 is G, E, gamma-Glutamic acid, D-glutamic acid, or 2-[2-(2-amino-ethoxy)-ethoxy]-acetyl, then position 43 may be absent absent or E, gamma-Glutamic acid, or D-glutamic acid; wherein if position 43 is absent, then positions 44-46 are also absent; wherein if positions 44-46 are absent then position 43 may be amidated
  VARIANT 44: note = wherein if position 43 is E, gamma-Glutamic acid, or D-glutamic acid, then position 44 may be absent or E; wherein if position 44 is absent, then positions 45-46 are also absent; wherein if positions 45-46 are absent then position 44 may be amidated
  VARIANT 45: note = wherein if position 44 is E then position 45 may be absent or E; wherein if position 45 is absent then position 46 is also absent; where in if position 46 is absent, then position 45 may be amidated
  VARIANT 46: note = wherein if position 45 is E then position 46 may be absent or E; wherein if position 46 is present, then it may be amidated
XXQXTXTSDXXXXLXXXAXXXFXXXLXXXXXXSXXXXXXXXXXXXX

SEQ ID NO: 1244 - protein, 44 aa, synthetic construct
  VARIANT 1: note = Y or N-methyl-tyrosine
  SITE 2: note = 2-Aminoisobutyric Acid
  VARIANT 10: note = F, 3-(4-Pyridyl)-L-alanine or 4-cyano-L-phenylalanine
  VARIANT 12: note = L-ornithine, K, R, I, Q, (S)-2,3-diaminopropanoic acid or (S)-2,4-diaminobutanoic acid
  SITE 13: note = alpha-methyl-leucine
  VARIANT 16: note = K or L-ornithine
  VARIANT 17: note = Any amino acid with a functional group available for conjugation to a fatty acid
  VARIANT 20: note = 2-Aminoisobutyric Acid, alpha-methyl-3-(4-Pyridyl)-L-alanine, Q or L-isovaline
  VARIANT 21: note = A, Q or L-ornithine
  VARIANT 24: note = E or Q
  VARIANT 25: note = W, Y, 3-(4-Pyridyl)-L-alanine, alpha-methyl-L-tyrosine or alpha-methyl-3-(4-Pyridyl)-L-alanine
  VARIANT 27: note = L or I
  VARIANT 28: note = E, Q or A
  VARIANT 29: note = G, D-alanine or 2-Aminoisobutyric Acid
  VARIANT 30: note = A, S or G
  VARIANT 31: note = P, H, S, 3-(4-Pyridyl)-L-alanine, E, T, N6-acetyl-L-lysine or Hydroxy-L-proline
  VARIANT 34: note = G or 2-Aminoisobutyric Acid
  VARIANT 35: note = A, 2-Aminoisobutyric Acid, E, H or 3-(4-Pyridyl)-L-alanine
  VARIANT 36: note = P or Hydroxy-L-proline
  VARIANT 37: note = P or Hydroxy-L-proline
  VARIANT 38: note = P or Hydroxy-L-proline
  VARIANT 39: note = E, S, G, T, H, 3-(4-Pyridyl)-L-alanine or gamma-Glutamic acid; wherein if positions 40-44 are absent, then position 39 may be amidated
  VARIANT 40: note = May be absent or G, E, S or D-glutamic acid; wherein if position 40 is absent, then positions 41-44 are also absent; wherein if positions 41-44 are absent, then position 40 may be amidated
  VARIANT 41: note = wherein if position 40 is G, E, S or D-glutamic acid, then position 41 may be absent or E, S, T, 3-(4-Pyridyl)-L-alanine, D, G, Q or H; wherein if position 41 is absent, then positions 42-44 are also absent; wherein if positions 42-44 are absent, then position 41 may be amidated
  VARIANT 42: note = wherein if position 41 is E, S, T, 3-(4-Pyridyl)-L-alanine, D, G, Q or H, then position 42 may be absent or G, E or gamma-Glutamic acid; wherein if positions 43-44 are absent, then position 42 may be amidated
  VARIANT 43: note = wherein if position 42 is G, E, or gamma-Glutamic acid, then position 43 may be absent or E; wherein if position 43 is absent, then position 44 is also absent; wherein if position 44 is absent, then position 43 may be amidated
  VARIANT 44: note = wherein if position 43 is E, then position 44 may be absent or E; wherein if position 44 is present, then it may be amidated
XXQGTFTSDXSXXLDXXAQXXFIXXLXXXXXSSXXXXXXXXXXX

SEQ ID NO: 1245 - protein, 46 aa, synthetic construct
  VARIANT 1: note = Y, N-methyl-tyrosine or H
  SITE 2: note = 2-Aminoisobutyric Acid
  VARIANT 4: note = G or D-alanine
  VARIANT 6: note = F, alpha-methyl-L-phenylalanine or alpha-methyl-2-fluoro-L-phenylalanine
  VARIANT 10: note = F, 3-(3-Pyridyl)-L-alanine, 3-(4-Pyridyl)-L-alanine, 4-cyano-L-phenylalanine, 4-nitro-L-phenylalanine or Y
  VARIANT 11: note = S or alpha-methyl-L-serine
  VARIANT 12: note = L-ornithine, K, R, Q, (S)-2,3-diaminopropanoic acid, S, E or I, wherein if position 10 is F, 3-(3-Pyridyl)-L-alanine, 3-(4-Pyridyl)-L-alanine, 4-cyano-L-phenylalanine, or 4-nitro-L-phenylalanine, then position 12 is I
  VARIANT 13: note = alpha-methyl-leucine, I or L
  VARIANT 15: note = D or E
  VARIANT 16: note = K, L-ornithine, A or E
  VARIANT 17: note = Any amino acid with a functional group available for conjugation to a fatty acid, A, I or Q or L-ornithine
  VARIANT 17: note = at least one of positions 17, 20, 24 and 28 is an amino acid with a functional group available for conjugation to a fatty acid
  VARIANT 19: note = A or Q
  VARIANT 20: note = Any amino acid with a functional group available for conjugation to a fatty acid, 2-Aminoisobutyric Acid, Q, R or alpha-methyl-3-(4-Pyridyl)-L-alanine
  VARIANT 20: note = at least one of positions 17, 20, 24 and 28 is an amino acid with a functional group available for conjugation to a fatty acid
  VARIANT 21: note = A, (S)-2-aminohexanedioic acid, 2-Aminoisobutyric Acid, S, N, Q, E, T or L-ornithine
  VARIANT 23: note = I or V
  VARIANT 24: note = Any amino acid with a functional group available for conjugation to a fatty acid E, D-glutamic acid, Q, N or D-Glutamine
  VARIANT 24: note = at least one of positions 17, 20, 24 and 28 is an amino acid with a functional group available for conjugation to a fatty acid
  VARIANT 25: note = W, Y, F, 3-(4-Pyridyl)-L-alanine, alpha-methyl-L-tyrosine or alpha-methyl-3-(4-Pyridyl)-L-alanine
  VARIANT 27: note = L, I, E, V, A, (S)-2-aminohexanedioic acid, T, Q or S
  VARIANT 28: note = Any amino acid with a functional group available for conjugation to a fatty acid, E or A
  VARIANT 28: note = at least one of positions 17, 20, 24 and 28 is an amino acid with a functional group available for conjugation to a fatty acid
  VARIANT 29: note = G, 2-Aminoisobutyric Acid, T, D-alanine or A
  VARIANT 31: note = P or E
  VARIANT 32: note = S or P
  VARIANT 34: note = G or 2-Aminoisobutyric Acid
  VARIANT 35: note = A, D or E
  VARIANT 37: note = P or E
  VARIANT 39: note = E, S, G, A, T or L-ornithine; wherein if positions 40-46 are absent, then position 39 may be amidated
  VARIANT 40: note = May be absent or G, E, S, A, T or D-glutamic acid; wherein if position 40 is absent, then positions 41-46 are also absent; wherein if positions 41-46 are absent, then position 40 may be amidated
  VARIANT 41: note = wherein if position 40 is G, E, S, A, T or D-glutamic acid, then position 41 may be absent or is E, S, D, G, Q, T, A, gamma-Glutamic acid or D-glutamic acid; wherein if position 41 is absent, then positions 42-46 are also absent; wherein if positions 42-46 are absent, then position 41 may be amidated
  VARIANT 42: note = wherein if position 41 is E, S, D, G, Q, T, A, gamma-Glutamic acid or D-glutamic acid, then position 42 may be absent or G, E, D-glutamic acid or gamma-Glutamic acid; wherein if position 42 is absent, then positions 43-46 are also absent; wherein if positions 43-46 are absent, then position 42 may be amidated
  VARIANT 43: note = wherein if position 42 is G, E, D-glutamic acid or gamma-Glutamic acid, then position 43 may be absent or E, gamma-Glutamic acid, or D-glutamic acid; wherein if position 43 is absent, then positions 44-46 are also absent; wherein if positions 44-46 are absent, then position 43 may be amidated
  VARIANT 44: note = wherein if position 43 is E, gamma-Glutamic acid, or D-glutamic acid, then position 44 may be absent or E; wherein if position 44 is absent, then positions 45-46 are also absent; wherein if positions 45-46 are absent, then position 44 may be amidated
  VARIANT 45: note = wherein if position 44 is E then position 45 may be absent or E; wherein if position 45 is absent then position 46 is also absent; wherein if position 46 is absent, then position 45 may be amidated
  VARIANT 46: note = wherein if position 45 is E then position 46 may be absent or E; wherein if position 46 is present, then it may be amidated
XXQXTXTSDXXXXLXXXAXXXFXXXLXXXGXXSXXPXPXXXXXXXX
